(19) United States
(12) Patent Application Publication
(10) Pub. No.: US 2020/0248155 A1
(43) Pub. Date: Aug. 6, 2020

(54) RNA-GUIDED ENDONUCLEASE FUSION POLYPEPTIDES AND METHODS OF USE THEREOF

(71) Applicant: The Regents of the University of California, Oakland, CA (US)

(72) Inventor: Schaked Omer Halperin, Berkeley, CA (US)

(21) Appl. No.: 16/641,950

(22) PCT Filed: Sep. 6, 2018
(86) PCT No.: PCT/US2018/049766

§ 371 Date: Feb. 25, 2020

Related U.S. Application Data
(60) Provisional application No. 62/662,043, filed on Apr. 24, 2018.
(60) Provisional application No. 62/556,127, filed on Sep. 8, 2017.

(51) Int. Cl. C12N 9/22; C12N 9/12; C12N 15/11; C12N 15/10; C12N 9/78

(52) U.S. Cl. CPC C12N 9/22; C12N 9/1252; C12N 15/11; C12N 15/1024; C12N 2800/80; C12Y 305/04004; C12Y 305/04005; C12Y 207/07007; C12N 9/78

(57) ABSTRACT

The present disclosure provides a fusion polypeptide comprising: a) an enzymatically active RNA-guided endonuclease that introduces a single-stranded break in a target DNA; and b) an error-prone DNA polymerase. The present disclosure provides a system comprising: a) a fusion polypeptide of the present disclosure; and b) a guide RNA. The present disclosure provides a cell comprising a fusion polypeptide of the present disclosure, or a system of the present disclosure. The present disclosure provides a method of mutagenizing a target polynucleotide.

### CROSS-REFERENCE

[0001] This application claims the benefit of U.S. Provisional Patent Application No. 62/556,127, filed Sep. 8, 2017, and U.S. Provisional Patent Application No. 62/662,043, filed Apr. 24, 2018, which applications are incorporated herein by reference in their entirety.

### INCORPORATION BY REFERENCE OF SEQUENCE LISTING PROVIDED AS A TEXT FILE

[0002] A Sequence Listing is provided herewith as a text file, “BERK-363WO_Seq_List_180905_ST25” created on Sep. 6, 2018 and having a size of 8,342 KB. The contents of the text file are incorporated by reference herein in their entirety.

### INTRODUCTION

[0003] Directed evolution is a powerful discovery approach that isolates genetic material with desirable properties from a library of sequence variants. However, the sequence space that can be explored is limited by the efficiency of synthesizing and transforming a genetic library. This requirement for efficient transformation rates has confined directed evolution to only a few model organisms. The ability to program a cell to localize increased mutagenesis at user-defined loci would remove the need to transform a synthesized library of nucleic acids; unfortunately, current in vivo targeted mutagenesis platforms are either confined to targeting a set locus in a specific organism or have a narrow and biased editing window at user-defined loci.

[0004] There is a need in the art for compositions and methods for mutagenizing a target DNA.

### SUMMARY

[0005] The present disclosure provides a fusion polypeptide comprising: a) an enzymatically active RNA-guided endonuclease that introduces a single-stranded break in a target DNA; and b) an error-prone DNA polymerase. The present disclosure provides a system comprising: a) a fusion polypeptide of the present disclosure; and b) a guide RNA. The present disclosure provides a cell comprising a fusion polypeptide of the present disclosure, or a system of the present disclosure. The present disclosure provides a method of mutagenizing a target polynucleotide.

### BRIEF DESCRIPTION OF THE DRAWINGS

[0006] FIG. 1 is a schematic depiction of an example of a fusion polypeptide of the present disclosure.

[0007] FIG. 2A-2C depict mutator designs (FIG. 2A), and mutational analysis of various mutators (FIGS. 2B and 2C).

[0008] FIG. 3 depicts the mutagenesis window length of various mutators.

[0009] FIG. 4A-4B depict characterization of the mutation rate, substitution bias, and mutagenesis window length in bacterial, fungal, and mammalian cells.

[0010] FIG. 5A-5F provides amino acid sequences of Streptococcus pyogenes Cas9 (FIG. 5A; SEQ ID NO:1219) and variants of Streptococcus pyogenes Cas9 (FIG. 5B-5F). FIG. 5B: SEQ ID NO:1220; FIG. 5C: SEQ ID NO:1221; FIG. 5D: SEQ ID NO:1222; FIG. 5E: SEQ ID NO:1223; and FIG. 5F: SEQ ID NO:1210.

[0011] FIG. 6 provides an amino acid sequence of Staphylococcus aureus Cas9 (SEQ ID No.:1224).

[0012] FIG. 7A-7C provide amino acid sequences of Francisella tularensis Cpf1 (FIG. 7A; SEQ ID NO:1225), Acidaminococcus sp. BV3L6 Cpf1 (FIG. 7B; SEQ ID NO:1226), and a variant Cpf1 (FIG. 7C; SEQ ID NO:1227).

[0013] FIG. 8A-8D provide amino acid sequences DNA polymerases PolI1M (FIG. 8A; SEQ ID NO:1228), PolI2M (FIG. 8B; SEQ ID NO:1229), PolI3M (FIG. 8C; SEQ ID NO:1230), and PolI3M-TBD (FIG. 8D; SEQ ID NO:1231)

[0014] FIG. 9 provides an amino acid sequence of Phi29 DNA polymerase (SEQ ID NO:1232).

[0015] FIG. 10 provides an amino acid sequence of a T5 DNA polymerase (SEQ ID NO:1233).

[0016] FIG. 11A-11B provide amino acid sequences of T7 DNA polymerase (FIG. 11A; SEQ ID NO:1234) and Sequenase (FIG. 11B; SEQ ID NO:1235).

[0017] FIG. 12 provides an amino acid sequence of a Sulfolobus solfataricus DNA-binding protein 7d (Sso7d) (SEQ ID NO:1236).

[0018] FIG. 13 provides an amino acid sequence of DNA polymerase Iota (SEQ ID NO:1237).

[0019] FIGS. 14A-14B provide an amino acid sequence of DNA polymerase η (SEQ ID NO:1238).

[0020] FIGS. 15A-15B provide an amino acid sequence of DNA polymerase κ (SEQ ID NO:1239).

[0021] FIGS. 16A-16D provide an amino acid sequence of DNA polymerase θ (SEQ ID NO:1240).

[0022] FIGS. 17A-17B provide an amino acid sequence of DNA polymerase ν (SEQ ID NO:1241).

[0023] FIG. 18 provides an amino acid sequence of E. coli DNA polymerase IV (SEQ ID NO:1242).

[0024] FIG. 19A-19B provide an amino acid sequence of topoisomerase I (SEQ ID NO:1243).

[0025] FIG. 20 provides an amino acid sequence of a flap endonuclease (SEQ ID NO:1244).

[0026] FIG. 21 provides an amino acid sequence of a T4 DNA ligase (SEQ ID NO:1245).

[0027] FIGS. 22A-22E provide a schematic of an example of a fusion polypeptide of the present disclosure, a characterization of substitution frequency, and analysis of mutation rates.

[0028] FIGS. 23A-23H provide an analysis of mutation rates, mutagenesis window lengths, combinatorial mutations, multiplexed targeting, and continuous diversification of genomic loci.

[0029] FIGS. 24A-24D provide characterization of mutations to E. coli's Ribosomal Subunit 5 gene, rpsE, that confer spectinomycin resistance.

[0030] FIG. 25 provides an analysis of the direction of mutagenesis relative to a gRNA.

[0031] FIG. 26 provides a characterization of the mutation rate of various mutators at a distance from a nick.

[0032] FIG. 27 provides a characterization of the target window length of a more processive DNA polymerase fused to enCas9.

[0033] FIG. 28 provides the off-target mutation rate of various mutators.

[0034] FIGS. 29A-29B illustrate coupling of mutagenesis by examples of fusion polypeptides of the present disclosure with a non-selectable genetic screen.

[0035] FIGS. 30A-30C illustrate the viability and growth rate of E. coli expressing examples of fusion polypeptides of the present disclosure.

[0036] FIG. 31 illustrates locations of gRNA targets and mutations relative to the rpsE gene.

[0037] FIGS. 32A-32B illustrate deletions in ribosomal protein S5 and the effect of the deletions on spectinomycin resistance.

[0038] FIG. 33 provides a comparison of E. coli diversification methods.

[0039] FIG. 34 provides oligonucleotide sequences.

[0040] FIG. 35 provides gRNA protospacer sequences.

[0041] FIG. 36 provides plasmid sequences.

[0042] FIG. 37 provides amino acid sequences of various Cas9 and DNA polymerase polypeptides.

[0043] FIG. 38 is a schematic depiction of base editing.

[0044] FIG. 39A-39D depict use of a system of the present disclosure to introduce mutations into a target gene in eukaryotic cells.

[0045] FIG. 40A-40D depict fluorescence activated cell sorting (FACS) plots showing the analysis of a mutation into a target gene in eukaryotic cells.

### DEFINITIONS

[0046] The terms “polynucleotide” and “nucleic acid,” used interchangeably herein, refer to a polymeric form of nucleotides of any length, either ribonucleotides or deoxynucleotides. Thus, this term includes, but is not limited to, single-, double-, or multi-stranded DNA or RNA, genomic DNA, cDNA, DNA-RNA hybrids, or a polymer comprising purine and pyrimidine bases or other natural, chemically or biochemically modified, non-natural, or derivatized nucleotide bases. The terms “polynucleotide” and “nucleic acid” should be understood to include, as applicable to the embodiment being described, single-stranded (such as sense or antisense) and double-stranded polynucleotides.

[0047] The terms “polypeptide,” “peptide,” and “protein”, are used interchangeably herein, refer to a polymeric form of amino acids of any length, which can include genetically coded and non-genetically coded amino acids, chemically or biochemically modified or derivatized amino acids, and polypeptides having modified peptide backbones. The term includes fusion proteins, including, but not limited to, fusion proteins with a heterologous amino acid sequence, fusions with heterologous and homologous leader sequences, with or without N-terminal methionine residues; immunologically tagged proteins; and the like.

[0048] The term “naturally-occurring” as used herein as applied to a nucleic acid, a protein, a cell, or an organism, refers to a nucleic acid, cell, protein, or organism that is found in nature.

[0049] As used herein the term “isolated” is meant to describe a polynucleotide, a polypeptide, or a cell that is in an environment different from that in which the polynucleotide, the polypeptide, or the cell naturally occurs. An isolated genetically modified host cell may be present in a mixed population of genetically modified host cells.

[0050] “Heterologous,” as used herein, refers to a nucleotide or amino acid sequence that is not found in the native nucleic acid or protein, respectively. For example, relative to a Cas9 polypeptide, a heterologous polypeptide comprises an amino acid sequence from a protein other than the Cas9 polypeptide. Thus, for example, a polymerase polypeptide is heterologous to a Cas9 polypeptide.

[0051] “Recombinant,” as used herein, means that a particular nucleic acid (DNA or RNA) is the product of various combinations of cloning, restriction, and/or ligation steps resulting in a construct having a structural coding or non-coding sequence distinguishable from endogenous nucleic acids found in natural systems. Generally, nucleotide sequences encoding the structural coding sequence can be assembled from cDNA fragments and short oligonucleotide linkers, or from a series of synthetic oligonucleotides, to provide a synthetic nucleic acid which is capable of being expressed from a recombinant transcriptional unit contained in a cell or in a cell-free transcription and translation system. Such sequences can be provided in the form of an open reading frame uninterrupted by internal non-translated sequences, or introns, which are typically present in eukaryotic genes. Genomic DNA comprising the relevant nucleotide sequences can also be used in the formation of a recombinant gene or transcriptional unit. Sequences of non-translated DNA may be present 5′ or 3′ from the open reading frame, where such sequences do not interfere with manipulation or expression of the coding regions, and may indeed act to modulate production of a desired product by various mechanisms (see “DNA regulatory sequences”, below).

[0052] Thus, e.g., the term “recombinant” polynucleotide or “recombinant” nucleic acid refers to one which is not naturally occurring, e.g., is made by the artificial combination of two otherwise separated segments of sequence through human intervention. This artificial combination is often accomplished by either chemical synthesis means, or by the artificial manipulation of isolated segments of nucleic acids, e.g., by genetic engineering techniques. Such artificial combination can be carried out to join together nucleic acid segments of desired functions to generate a desired combination of functions.

[0053] Similarly, the term “recombinant” polypeptide refers to a polypeptide which is not naturally occurring, e.g., is made by the artificial combination of two otherwise separated segments of amino acid sequence through human intervention. Thus, e.g., a polypeptide that comprises a heterologous amino acid sequence is recombinant.

[0054] By “construct” or “vector” is meant a recombinant nucleic acid, generally recombinant DNA, which has been generated for the purpose of the expression and/or propagation of a specific nucleotide sequence(s), or is to be used in the construction of other recombinant nucleotide sequences.

[0055] The terms “DNA regulatory sequences,” “control elements,” and “regulatory elements,” used interchangeably herein, refer to transcriptional and translational control sequences, such as promoters, enhancers, polyadenylation signals, terminators, protein degradation signals, and the like, that provide for and/or regulate expression of a coding sequence and/or production of an encoded polypeptide in a host cell.

[0056] The term “transformation” is used interchangeably herein with “genetic modification” and refers to a permanent or transient genetic change induced in a cell following introduction of new nucleic acid (e.g., DNA exogenous to the cell) into the cell. Genetic change (“modification”) can be accomplished either by incorporation of the new nucleic acid into the genome of the host cell, or by transient or stable maintenance of the new nucleic acid as an episomal element. Where the cell is a eukaryotic cell, a permanent genetic change can be achieved by introduction of new DNA into the genome of the cell. In prokaryotic cells, permanent changes can be introduced into the chromosome or via extrachromosomal elements such as plasmids and expression vectors, which may contain one or more selectable markers to aid in their maintenance in the recombinant host cell. Suitable methods of genetic modification include viral infection, transfection, conjugation, protoplast fusion, electroporation, particle gun technology, calcium phosphate precipitation, direct microinjection, and the like. The choice of method is generally dependent on the type of cell being transformed and the circumstances under which the transformation is taking place (i.e. in vitro, ex vivo, or in vivo). A general discussion of these methods can be found in Ausubel, et al, Short Protocols in Molecular Biology, 3rd ed., Wiley & Sons, 1995.

[0057] “Operably linked” refers to a juxtaposition wherein the components so described are in a relationship permitting them to function in their intended manner. For instance, a promoter is operably linked to a coding sequence if the promoter affects its transcription or expression. As used herein, the terms “heterologous promoter” and “heterologous control regions” refer to promoters and other control regions that are not normally associated with a particular nucleic acid in nature. For example, a “transcriptional control region heterologous to a coding region” is a transcriptional control region that is not normally associated with the coding region in nature.

[0058] A “host cell,” as used herein, denotes an in vivo or in vitro eukaryotic cell, a prokaryotic cell, or a cell from a multicellular organism (e.g., a cell line) cultured as a unicellular entity, which eukaryotic or prokaryotic cells can be, or have been, used as recipients for a nucleic acid (e.g., an expression vector), and include the progeny of the original cell which has been genetically modified by the nucleic acid. It is understood that the progeny of a single cell may not necessarily be completely identical in morphology or in genomic or total DNA complement as the original parent, due to natural, accidental, or deliberate mutation. A “recombinant host cell” (also referred to as a “genetically modified host cell”) is a host cell into which has been introduced a heterologous nucleic acid, e.g., an expression vector. For example, a prokaryotic host cell is a genetically modified prokaryotic host cell (e.g., a bacterium), by virtue of introduction into a suitable prokaryotic host cell of a heterologous nucleic acid, e.g., an exogenous nucleic acid that is foreign to (not normally found in nature in) the prokaryotic host cell, or a recombinant nucleic acid that is not normally found in the prokaryotic host cell; and a eukaryotic host cell is a genetically modified eukaryotic host cell, by virtue of introduction into a suitable eukaryotic host cell of a heterologous nucleic acid, e.g., an exogenous nucleic acid that is foreign to the eukaryotic host cell, or a recombinant nucleic acid that is not normally found in the eukaryotic host cell.

[0059] The term “conservative amino acid substitution” refers to the interchangeability in proteins of amino acid residues having similar side chains. For example, a group of amino acids having aliphatic side chains consists of glycine, alanine, valine, leucine, and isoleucine; a group of amino acids having aliphatic-hydroxyl side chains consists of serine and threonine; a group of amino acids having amide-containing side chains consists of asparagine and glutamine; a group of amino acids having aromatic side chains consists of phenylalanine, tyrosine, and tryptophan; a group of amino acids having basic side chains consists of lysine, arginine, and histidine; and a group of amino acids having sulfur-containing side chains consists of cysteine and methionine. Exemplary conservative amino acid substitution groups are: valine-leucine-isoleucine, phenylalanine-tyrosine, lysine-arginine, alanine-valine, and asparagine-glutamine.

[0060] A polynucleotide or polypeptide has a certain percent “sequence identity” to another polynucleotide or polypeptide, meaning that, when aligned, that percentage of bases or amino acids are the same, and in the same relative position, when comparing the two sequences. Sequence similarity can be determined in a number of different manners. To determine sequence identity, sequences can be aligned using the methods and computer programs, including BLAST, available over the world wide web at ncbi.nlm.nih.gov/BLAST. See, e.g., Altschul et al. (1990), J. Mol. Biol. 215:403-10. Another alignment algorithm is FASTA, available in the Genetics Computing Group (GCG) package, from Madison, Wis., USA, a wholly owned subsidiary of Oxford Molecular Group, Inc. Other techniques for alignment are described in Methods in Enzymology, vol. 266: Computer Methods for Macromolecular Sequence Analysis (1996), ed. Doolittle, Academic Press, Inc., a division of Harcourt Brace & Co., San Diego, Calif., USA. Of particular interest are alignment programs that permit gaps in the sequence. The Smith-Waterman is one type of algorithm that permits gaps in sequence alignments. See Meth. Mol. Biol. 70: 173-187 (1997). Also, the GAP program using the Needleman and Wunsch alignment method can be utilized to align sequences. See J. Mol. Biol. 48: 443-453 (1970).

[0061] Before the present invention is further described, it is to be understood that this invention is not limited to particular embodiments described, as such may, of course, vary. It is also to be understood that the terminology used herein is for the purpose of describing particular embodiments only, and is not intended to be limiting, since the scope of the present invention will be limited only by the appended claims.

[0062] Where a range of values is provided, it is understood that each intervening value, to the tenth of the unit of the lower limit unless the context clearly dictates otherwise, between the upper and lower limit of that range and any other stated or intervening value in that stated range, is encompassed within the invention. The upper and lower limits of these smaller ranges may independently be included in the smaller ranges, and are also encompassed within the invention, subject to any specifically excluded limit in the stated range. Where the stated range includes one or both of the limits, ranges excluding either or both of those included limits are also included in the invention.

[0063] Unless defined otherwise, all technical and scientific terms used herein have the same meaning as commonly understood by one of ordinary skill in the art to which this invention belongs. Although any methods and materials similar or equivalent to those described herein can also be used in the practice or testing of the present invention, the preferred methods and materials are now described. All publications mentioned herein are incorporated herein by reference to disclose and describe the methods and/or materials in connection with which the publications are cited.

[0064] It must be noted that as used herein and in the appended claims, the singular forms “a,” “an,” and “the” include plural referents unless the context clearly dictates otherwise. Thus, for example, reference to “a guide RNA” includes a plurality of such guide RNAs and reference to “the RNA-guided endonuclease” includes reference to one or more RNA-guided endonucleases and equivalents thereof known to those skilled in the art, and so forth. It is further noted that the claims may be drafted to exclude any optional element. As such, this statement is intended to serve as antecedent basis for use of such exclusive terminology as “solely,” “only” and the like in connection with the recitation of claim elements, or use of a “negative” limitation.

[0065] It is appreciated that certain features of the invention, which are, for clarity, described in the context of separate embodiments, may also be provided in combination in a single embodiment. Conversely, various features of the invention, which are, for brevity, described in the context of a single embodiment, may also be provided separately or in any suitable sub-combination. All combinations of the embodiments pertaining to the invention are specifically embraced by the present invention and are disclosed herein just as if each and every combination was individually and explicitly disclosed. In addition, all sub-combinations of the various embodiments and elements thereof are also specifically embraced by the present invention and are disclosed herein just as if each and every such sub-combination was individually and explicitly disclosed herein.

[0066] The publications discussed herein are provided solely for their disclosure prior to the filing date of the present application. Nothing herein is to be construed as an admission that the present invention is not entitled to antedate such publication by virtue of prior invention. Further, the dates of publication provided may be different from the actual publication dates which may need to be independently confirmed.

### DETAILED DESCRIPTION

[0067] The present disclosure provides a fusion polypeptide comprising: a) an enzymatically active RNA-guided endonuclease that introduces a single-stranded break (a nick) in a target DNA; and b) an error-prone DNA polymerase. The present disclosure provides a system comprising: a) a fusion polypeptide of the present disclosure; and b) a guide RNA. The present disclosure provides a cell comprising a fusion polypeptide of the present disclosure, or a system of the present disclosure. The present disclosure provides a method of mutagenizing a target polynucleotide.

### Fusion Polypeptides

[0068] The present disclosure provides a fusion polypeptide comprising: a) an enzymatically active RNA-guided endonuclease that introduces a single-stranded break in a target DNA; and b) an error-prone DNA polymerase. A fusion polypeptide of the present disclosure is also referred to herein as a “mutator.”

[0069] In some cases, a fusion polypeptide of the present disclosure comprises, in order from N-terminus to C-terminus: a) an enzymatically active RNA-guided endonuclease that introduces a single-stranded break in a target DNA; and b) an error-prone DNA polymerase. In some cases, a fusion polypeptide of the present disclosure comprises, in order from N-terminus to C-terminus: a) an error-prone DNA polymerase; and b) an enzymatically active RNA-guided endonuclease that introduces a single-stranded break in a target DNA.

[0070] In some cases, a fusion polypeptide of the present disclosure comprises, in order from N-terminus to C-terminus: a) an enzymatically active RNA-guided endonuclease that introduces a single-stranded break in a target DNA; b) a peptide linker; and c) an error-prone DNA polymerase. In some instances, the fusion polypeptide comprises one or more nuclear localization signals (NLSs). For example, in some cases, the fusion polypeptide comprises a single NLS at the N-terminus of the fusion polypeptide. In some cases, the fusion polypeptide comprises 2, 3, or 4 NLSs at the N-terminus of the fusion polypeptide. In other instances, in some cases, the fusion polypeptide comprises a single NLS at the C-terminus of the fusion polypeptide. In some cases, the fusion polypeptide comprises 2, 3, or 4 NLSs at the C-terminus of the fusion polypeptide.

[0071] In some cases, a fusion polypeptide of the present disclosure comprises, in order from N-terminus to C-terminus: a) an error-prone DNA polymerase; b) a peptide linker; and c) an enzymatically active RNA-guided endonuclease that introduces a single-stranded break in a target DNA. In some instances, the fusion polypeptide comprises one or more NLSs. For example, in some cases, the fusion polypeptide comprises a single NLS at the N-terminus of the fusion polypeptide. In some cases, the fusion polypeptide comprises 2, 3, or 4 NLSs at the N-terminus of the fusion polypeptide. In other instances, in some cases, the fusion polypeptide comprises a single NLS at the C-terminus of the fusion polypeptide. In some cases, the fusion polypeptide comprises 2, 3, or 4 NLSs at the C-terminus of the fusion polypeptide.

[0072] The linker polypeptide may have any of a variety of amino acid sequences. Proteins can be joined by a spacer peptide, generally of a flexible nature, although other chemical linkages are not excluded. Suitable linkers include polypeptides of between 4 amino acids and 40 amino acids in length, or between 4 amino acids and 25 amino acids in length. These linkers can be produced by using synthetic, linker-encoding oligonucleotides to couple the proteins, or can be encoded by a nucleic acid sequence encoding the fusion protein. Peptide linkers with a degree of flexibility can be used. The linking peptides may have virtually any amino acid sequence, bearing in mind that the preferred linkers will have a sequence that results in a generally flexible peptide. The use of small amino acids, such as glycine and alanine, are of use in creating a flexible peptide. The creation of such sequences is routine to those of skill in the art. A variety of different linkers are commercially available and are considered suitable for use.

[0073] Examples of linker polypeptides include glycine polymers (G)ₙ, glycine-serine polymers (including, for example, (GS)ₙ, (GSGGS)ₙ (SEQ ID NO:1154), (GGSGGS)ₙ (SEQ ID NO:1155), and (GGGS)ₙ (SEQ ID NO:1156), where n is an integer of at least one); glycine-alanine polymers; and alanine-serine polymers. Exemplary linkers can comprise amino acid sequences including, but not limited to, GGSG (SEQ ID NO:1157), GGSGG (SEQ ID NO:1158), GSGSG (SEQ ID NO:1159), GSGGG (SEQ ID NO:1160), GGGSG (SEQ ID NO:1161), GSSSG (SEQ ID NO:1162), and the like. Also suitable is a linker having the sequence (GGGGS)n, where n is an integer of from 1 to 10 (e.g., 1, 2, 3, 4, 5, 6, 7, 8, 9, or 10). The ordinarily skilled artisan will recognize that design of a peptide conjugated to any desired element can include linkers that are all or partially flexible, such that the linker can include a flexible linker as well as one or more portions that confer less flexible structure.

[0074] A fusion polypeptide of the present disclosure exhibits a high degree of processivity. The processivity of DNA synthesis by a DNA polymerase is defined as the number of nucleotides that a polymerase can incorporate into DNA during a single template-binding event, before dissociating from a DNA template.

[0075] In some cases, a fusion polypeptide of the present disclosure, when complexed with a guide RNA, exhibits a target mutation rate of from 10⁻⁸ to 10⁻² mutations per nucleotide per genome replication event. In some cases, a fusion polypeptide of the present disclosure, when complexed with a guide RNA, exhibits a target mutation rate of greater than 10⁻⁸ mutations per nucleotide per genome replication event, e.g., greater than 10⁻⁸, greater than 10⁻⁷, greater than 10⁻⁶, greater than 10⁻⁵, greater than 10⁻⁴, or greater than 10⁻³, mutations per nucleotide per genome replication event. In some cases, a fusion polypeptide of the present disclosure, when complexed with a guide RNA, exhibits a target mutation rate of from 10⁻⁸ to 10⁻⁷ mutations per nucleotide per genome replication event. In some cases, a fusion polypeptide of the present disclosure, when complexed with a guide RNA, exhibits a target mutation rate of from 10⁻⁷ to 10⁻⁶ mutations per nucleotide per genome replication event. In some cases, a fusion polypeptide of the present disclosure, when complexed with a guide RNA, exhibits a target mutation rate of from 10⁻⁷ to 10⁻⁵ mutations per nucleotide per genome replication event. In some cases, a fusion polypeptide of the present disclosure, when complexed with a guide RNA, exhibits a target mutation rate of from 10⁻⁵ to 10⁻⁴ mutations per nucleotide per genome replication event. In some cases, a fusion polypeptide of the present disclosure, when complexed with a guide RNA, exhibits a target mutation rate of from 10⁻⁴ to 10⁻³ mutations per nucleotide per genome replication event. In some cases, a fusion polypeptide of the present disclosure, when complexed with a guide RNA, exhibits a target mutation rate of from 10⁻³ to 10⁻² mutations per nucleotide per genome replication event.

[0076] In some cases, a fusion polypeptide of the present disclosure, when complexed with a guide RNA, exhibits a target mutation rate of 1 mutation per nucleotide per genome replication event.

[0077] In some cases, a fusion polypeptide of the present disclosure, when complexed with a guide RNA, exhibits a ratio of target mutation rate to global mutation rate of at least 1.5:1, at least 2:1, at least 5:1, at least 10:1, at least 25:1, at least 50:1, at least 10²:1, at least 5×10²:1, at least 10³:1, at least 5×10³:1, at least 10⁴:1, or more than 10⁴:1. In some cases, a fusion polypeptide of the present disclosure, when complexed with a guide RNA, exhibits a ratio of target mutation rate to global mutation rate of from about 1.5:1 to 10⁴:1, e.g., from about 1.5:1 to 2:1, from 2:1 to 5:1, from 5:1 to 10:1, from 10:1 to 25:1, from 25:1 to 50:1, from 50:1 to 10²:1, from 10²:1 to 5×10²:1, from 5×10²:1 to 10³:1, from 10³:1 to 5×10³:1, from 5×10³:1 to 10⁴:1, or more than 10⁴:1.

[0078] In some cases, a fusion polypeptide of the present disclosure, when complexed with a guide RNA, exhibits a target mutation rate that is at least 2-fold higher than the target mutation rate exhibited by the error-prone DNA polymerase present in the fusion polypeptide when the error-prone DNA polymerase is not fused to the RNA-guided endonuclease present in the fusion polypeptide. In some cases, a fusion polypeptide of the present disclosure, when complexed with a guide RNA, exhibits a target mutation rate that is at least 2-fold, at least 5-fold, at least 10-fold, at least 50-fold, at least 10²-fold, at least 5×10²-fold, at least 10³-fold, at least 5×10³-fold, or at least 10⁴-fold, higher than the target mutation rate exhibited by the error-prone DNA polymerase present in the fusion polypeptide when the error-prone DNA polymerase is not fused to the RNA-guided endonuclease present in the fusion polypeptide. In some cases, a fusion polypeptide of the present disclosure, when complexed with a guide RNA, exhibits a target mutation rate that is more than 10⁴-fold higher than the target mutation rate exhibited by the error-prone DNA polymerase present in the fusion polypeptide when the error-prone DNA polymerase is not fused to the RNA-guided endonuclease present in the fusion polypeptide.

[0079] In some cases, a fusion polypeptide of the present disclosure, when complexed with a guide RNA, introduces mutations at a distance of from 1 nucleotide to 10⁴ nucleotides from a nick in a target DNA introduced by the RNA-guided endonuclease. For example, in some cases, a fusion polypeptide of the present disclosure, when complexed with a guide RNA, introduces mutations at a distance of from 1 nucleotide (nt) to 10 nucleotides (nt), from 10 nt to 50 nt, from 50 nt to 100 nt, from 100 nt to 500 nt, from 500 nt to 10³ nt, from 10³ nt to 5×10³ nt, or from 5×10³ nt to 10⁴ nt from a nick in a target DNA introduced by the RNA-guided endonuclease. In some cases, a fusion polypeptide of the present disclosure, when complexed with a guide RNA, introduces mutations at a distance of from 1 nt to 10 nt from a nick in a target DNA introduced by the RNA-guided endonuclease. In some cases, a fusion polypeptide of the present disclosure, when complexed with a guide RNA, introduces mutations at a distance of from 1 nt to 25 nt from a nick in a target DNA introduced by the RNA-guided endonuclease. In some cases, a fusion polypeptide of the present disclosure, when complexed with a guide RNA, introduces mutations at a distance of from 10 nt to 25 nt from a nick in a target DNA introduced by the RNA-guided endonuclease. In some cases, a fusion polypeptide of the present disclosure, when complexed with a guide RNA, introduces mutations at a distance of from 1 nt to 50 nt from a nick in a target DNA introduced by the RNA-guided endonuclease. In some cases, a fusion polypeptide of the present disclosure, when complexed with a guide RNA, introduces mutations at a distance of from 10 nt to 50 nt from a nick in a target DNA introduced by the RNA-guided endonuclease. In some cases, a fusion polypeptide of the present disclosure, when complexed with a guide RNA, introduces mutations at a distance of from 25 nt to 50 nt from a nick in a target DNA introduced by the RNA-guided endonuclease. In some cases, a fusion polypeptide of the present disclosure, when complexed with a guide RNA, introduces mutations at a distance of from 1 nt to 100 nt from a nick in a target DNA introduced by the RNA-guided endonuclease. In some cases, a fusion polypeptide of the present disclosure, when complexed with a guide RNA, introduces mutations at a distance of from 10 nt to 100 nt from a nick in a target DNA introduced by the RNA-guided endonuclease. In some cases, a fusion polypeptide of the present disclosure, when complexed with a guide RNA, introduces mutations at a distance of from 50 nt to 100 nt from a nick in a target DNA introduced by the RNA-guided endonuclease.

### RNA-Guided Endonucleases

[0080] A fusion polypeptide of the present disclosure comprises: a) an enzymatically active RNA-guided endonuclease that introduces a single-stranded break in a target DNA; and b) an error-prone DNA polymerase. An RNA-guided endonuclease is also referred to herein as a “genome-editing nuclease.”

[0081] Examples of RNA-guided endonucleases are CRISPR/Cas endonucleases (e.g., class 2 CRISPR/Cas endonucleases such as a type II, type V, or type VI CRISPR/Cas endonucleases). A CRISPR/Cas endonuclease is also referred to as a CRISPR/Cas effector polypeptide. A suitable genome editing nuclease is a CRISPR/Cas endonuclease (e.g., a class 2 CRISPR/Cas endonuclease such as a type II, type V, or type VI CRISPR/Cas endonuclease). In some cases, a suitable RNA-guided endonuclease is a class 2 CRISPR/Cas endonuclease. In some cases, a suitable RNA-guided endonuclease is a class 2 type II CRISPR/Cas endonuclease (e.g., a Cas9 protein). In some cases, a genome targeting composition includes a class 2 type V CRISPR/Cas endonuclease (e.g., a Cpf1 protein, a C2c1 protein, or a C2c3 protein). In some cases, a suitable RNA-guided endonuclease is a class 2 type VI CRISPR/Cas endonuclease (e.g., a C2c2 protein; also referred to as a “Cas13a” protein). Also suitable for use is a CasX protein. Also suitable for use is a CasY protein.

[0082] In some cases, the genome-editing endonuclease is a Type II CRISPR/Cas endonuclease. In some cases, the genome-editing endonuclease is a Cas9 polypeptide. The Cas9 protein is guided to a target site (e.g., stabilized at a target site) within a target nucleic acid sequence (e.g., a chromosomal sequence or an extrachromosomal sequence, e.g., an episomal sequence, a minicircle sequence, a mitochondrial sequence, a chloroplast sequence, etc.) by virtue of its association with the protein-binding segment of the Cas9 guide RNA. In some cases, a Cas9 polypeptide comprises an amino acid sequence having at least 50%, at least 60%, at least 70%, at least 80%, at least 90%, at least 95%, at least 98%, at least 99%, or more than 99%, amino acid sequence identity to the Streptococcus pyogenes Cas9 depicted in FIG. 5A. In some cases, a Cas9 polypeptide comprises the amino acid sequence depicted in one of FIG. 5A-5F.

[0083] In some cases, the Cas9 polypeptide used in a composition or method of the present disclosure is a Staphylococcus aureus Cas9 (saCas9) polypeptide. In some cases, the saCas9 polypeptide comprises an amino acid sequence having at least 85%, at least 90%, at least 95%, at least 98%, at least 99%, or 100%, amino acid sequence identity to the saCas9 amino acid sequence depicted in FIG. 6.

[0084] In some cases, the Cas9 polypeptide used in a composition or method of the present disclosure is a Campylobacter jejuni Cas9 (CjCas9) polypeptide. CjCas9 recognizes the 5′NNNVRYM-3′ as the protospacer-adjacent motif (PAM). The amino acid sequence of CjCas9 is set forth in SEQ ID NO:50. In some cases, a Cas9 polypeptide suitable for use in a composition or method of the present disclosure comprises an amino acid sequence having at least 50%, at least 60%, at least 70%, at least 80%, at least 90%, at least 95%, at least 98%, at least 99%, or more than 99%, amino acid sequence identity to the CjCas9 amino acid sequence set forth in SEQ ID NO:50.

[0085] In some cases, a suitable Cas9 polypeptide is a high-fidelity (HF) Cas9 polypeptide. Kleinstiver et al. (2016) Nature 529:490. For example, amino acids N497, R661, Q695, and Q926 of the amino acid sequence depicted in FIG. 5A are substituted, e.g., with alanine. For example, an HF Cas9 polypeptide can comprise an amino acid sequence having at least 90%, at least 95%, at least 98%, at least 99%, or 100%, amino acid sequence identity to the amino acid sequence depicted in FIG. 5A, where amino acids N497, R661, Q695, and Q926 are substituted, e.g., with alanine.

[0086] In some cases, a suitable Cas9 polypeptide exhibits altered PAM specificity. See, e.g., Kleinstiver et al. (2015) Nature 523:481.

[0087] In some cases, the genome-editing endonuclease is a type V CRISPR/Cas endonuclease. In some cases a type V CRISPR/Cas endonuclease is a Cpf1 protein. In some cases, a Cpf1 protein comprises an amino acid sequence having at least 30%, at least 35%, at least 40%, at least 45%, at least 50%, at least 55%, at least 60%, at least 65%, at least 70%, at least 75%, at least 80%, at least 85%, at least 90%, at least 95%, at least 90%, or 100%, amino acid sequence identity to the Cpf1 amino acid sequence depicted in FIG. 7A, FIG. 7B, or FIG. 7C.

[0088] In some cases, the genome-editing endonuclease is a CasX or a CasY polypeptide. CasX and CasY polypeptides are described in Burstein et al. (2017) Nature 542:237.

### RNA-Guided Endonucleases

[0089] An RNA-guided endonuclease is also referred to herein as a “genome editing nuclease.”

[0090] Examples of suitable genome editing nucleases are CRISPR/Cas endonucleases (e.g., class 2 CRISPR/Cas endonucleases such as a type II, type V, or type VI CRISPR/Cas endonucleases). A suitable genome editing nuclease is a CRISPR/Cas endonuclease (e.g., a class 2 CRISPR/Cas endonuclease such as a type II, type V, or type VI CRISPR/Cas endonuclease). In some cases, a genome targeting composition includes a class 2 CRISPR/Cas endonuclease. In some cases, a genome targeting composition includes a class 2 type II CRISPR/Cas endonuclease (e.g., a Cas9 protein). In some cases, a genome targeting composition includes a class 2 type V CRISPR/Cas endonuclease (e.g., a Cpf1 protein, a C2c1 protein, or a C2c3 protein). In some cases, a genome targeting composition includes a class 2 type VI CRISPR/Cas endonuclease (e.g., a C2c2 protein; also referred to as a “Cas13a” protein). Also suitable for use is a CasX protein. Also suitable for use is a CasY protein.

[0091] In some cases, a genome editing nuclease is a fusion protein that is fused to a heterologous polypeptide (also referred to as a “fusion partner”). In some cases, a genome editing nuclease is fused to an amino acid sequence (a fusion partner) that provides for subcellular localization, i.e., the fusion partner is a subcellular localization sequence (e.g., one or more nuclear localization signals (NLSs) for targeting to the nucleus, two or more NLSs, three or more NLSs, etc.).

[0092] In some cases, the genome-editing endonuclease is a Type II CRISPR/Case endonuclease. In some cases, the genome-editing endonuclease is a Cas9 polypeptide. The Cas9 protein is guided to a target site (e.g., stabilized at a target site) within a target nucleic acid sequence (e.g., a chromosomal sequence or an extrachromosomal sequence, e.g., an episomal sequence, a minicircle sequence, a mitochondrial sequence, a chloroplast sequence, etc.) by virtue of its association with the protein-binding segment of the Cas9 guide RNA. In some cases, a Cas9 polypeptide comprises an amino acid sequence having at least 50%, at least 60%, at least 70%, at least 80%, at least 90%, at least 95%, at least 98%, at least 99%, or more than 99%, amino acid sequence identity to the Streptococcus pyogenes Cas9 depicted in FIG. 5A. In some cases, the Cas9 polypeptide used in a composition or method of the present disclosure is a Staphylococcus aureus Cas9 (saCas9) polypeptide. In some cases, the saCas9 polypeptide comprises an amino acid sequence having at least 85%, at least 90%, at least 95%, at least 98%, at least 99%, or 100%, amino acid sequence identity to the saCas9 amino acid sequence depicted in FIG. 6.

[0093] In some cases, a suitable Cas9 polypeptide is a high-fidelity (HF) Cas9 polypeptide. Kleinstiver et al. (2016) Nature 529:490. For example, amino acids N497, R661, Q695, and Q926 of the amino acid sequence depicted in FIG. 5A are substituted, e.g., with alanine. For example, an HF Cas9 polypeptide can comprise an amino acid sequence having at least 90%, at least 95%, at least 98%, at least 99%, or 100%, amino acid sequence identity to the amino acid sequence depicted in FIG. 5A, where amino acids N497, R661, Q695, and Q926 are substituted, e.g., with alanine.

[0094] In some cases, a suitable Cas9 polypeptide exhibits altered PAM specificity. See, e.g., Kleinstiver et al. (2015) Nature 523:481.

[0095] In some cases, the genome-editing endonuclease is a type V CRISPR/Cas endonuclease. In some cases, a type V CRISPR/Cas endonuclease is a Cpf1 protein. In some cases, a Cpf1 protein comprises an amino acid sequence having at least 30%, at least 35%, at least 40%, at least 45%, at least 50%, at least 55%, at least 60%, at least 65%, at least 70%, at least 75%, at least 80%, at least 85%, at least 90%, at least 95%, at least 90%, or 100%, amino acid sequence identity to the Cpf1 amino acid sequence depicted in FIG. 7A. In some cases, a Cpf1 protein comprises an amino acid sequence having at least 30%, at least 35%, at least 40%, at least 45%, at least 50%, at least 55%, at least 60%, at least 65%, at least 70%, at least 75%, at least 80%, at least 85%, at least 90%, at least 95%, at least 90%, or 100%, amino acid sequence identity to the Cpf1 amino acid sequence depicted in FIG. 7B. In some cases, a Cpf1 protein comprises an amino acid sequence having at least 30%, at least 35%, at least 40%, at least 45%, at least 50%, at least 55%, at least 60%, at least 65%, at least 70%, at least 75%, at least 80%, at least 85%, at least 90%, at least 95%, at least 90%, or 100%, amino acid sequence identity to the Cpf1 amino acid sequence depicted in FIG. 7C.

[0096] A nucleic acid that binds to a class 2 CRISPR/Cas endonuclease (e.g., a Cas9 protein; a type V or type VI CRISPR/Cas protein; a Cpf1 protein; etc.) and targets the complex to a specific location within a target nucleic acid is referred to herein as a “guide RNA” or “CRISPR/Cas guide nucleic acid” or “CRISPR/Cas guide RNA.” A guide RNA provides target specificity to the complex (the RNP complex) by including a targeting segment, which includes a guide sequence (also referred to herein as a targeting sequence), which is a nucleotide sequence that is complementary to a sequence of a target nucleic acid.

[0097] In some cases, a guide RNA includes two separate nucleic acid molecules: an “activator” and a “targeter” and is referred to herein as a “dual guide RNA”, a “double-molecule guide RNA”, a “two-molecule guide RNA”, or a “dgRNA.” In some cases, the guide RNA is one molecule (e.g., for some class 2 CRISPR/Cas proteins, the corresponding guide RNA is a single molecule; and in some cases, an activator and targeter are covalently linked to one another, e.g., via intervening nucleotides), and the guide RNA is referred to as a “single guide RNA”, a “single-molecule guide RNA,” a “one-molecule guide RNA”, or simply “sgRNA.”

[0098] In some cases, a composition of the present disclosure comprises an RNA-guided endonuclease, or both an RNA-guided endonuclease and a guide RNA. In some cases, e.g., where a target nucleic acid comprises a deleterious mutation in a defective allele (e.g., a deleterious mutation in a retinal cell target nucleic acid), the RNA-guided endonuclease/guide RNA complex, together with a donor nucleic acid comprising a nucleotide sequence that corrects the deleterious mutation (e.g., a donor nucleic acid comprising a nucleotide sequence that encodes a functional copy of the protein encoded by the defective allele), can be used to correct the deleterious mutation, e.g., via homology-directed repair (HDR).

[0099] In some cases, a composition of the present disclosure comprises: i) an RNA-guided endonuclease; and ii) one guide RNA. In some cases, the guide RNA is a single-molecule (or “single guide”) guide RNA (an “sgRNA”). In some cases, the guide RNA is a dual-molecule (or “dual-guide”) guide RNA (“dgRNA”).

[0100] In some cases, a composition of the present disclosure comprises: i) an RNA-guided endonuclease; and ii) 2 separate sgRNAs, where the 2 separate sgRNAs provide for deletion of a target nucleic acid via non-homologous end joining (NHEJ). In some cases, the guide RNAs are sgRNAs. In some cases, the guide RNAs are dgRNAs.

[0101] In some cases, a composition of the present disclosure comprises: i) a Cpf1 polypeptide; and ii) a guide RNA precursor; in these cases, the precursor can be cleaved by the Cpf1 polypeptide to generate 2 or more guide RNAs.

### Class 2 CRISPR/Cas Endonucleases

[0102] RNA-mediated adaptive immune systems in bacteria and archaea rely on Clustered Regularly Interspaced Short Palindromic Repeat (CRISPR) genomic loci and CRISPR-associated (Cas) proteins that function together to provide protection from invading viruses and plasmids. In class 2 CRISPR systems, the functions of the effector complex (e.g., the cleavage of target DNA) are carried out by a single endonuclease (e.g., see Zetsche et al., Cell. 2015 Oct. 22; 163(3):759-71; Makarova et al., Nat Rev Microbiol. 2015 November; 13(11):722-36; Shmakov et al., Mol Cell. 2015 Nov. 5; 60(3):385-97); and Shmakov et al. (2017) Nature Reviews Microbiology 15:169. As such, the term “class 2 CRISPR/Cas protein” is used herein to encompass the endonuclease (the target nucleic acid cleaving protein) from class 2 CRISPR systems. Thus, the term “class 2 CRISPR/Cas endonuclease” as used herein encompasses type II CRISPR/Cas proteins (e.g., Cas9); type V-A CRISPR/Cas proteins (e.g., Cpf1 (also referred to a “Cas12a”)); type V-B CRISPR/Cas proteins (e.g., C2c1 (also referred to as “Cas12b”)); type V-C CRISPR/Cas proteins (e.g., C2c3 (also referred to as “Cas12c”)); type V-U1 CRISPR/Cas proteins (e.g., C2c4); type V-U2 CRISPR/Cas proteins (e.g., C2c8); type V-U5 CRISPR/Cas proteins (e.g., C2c5); type V-U4 CRISPR/Cas proteins (e.g., C2c9); type V-U3 CRISPR/Cas proteins (e.g., C2c10); type VI-A CRISPR/Cas proteins (e.g., C2c2 (also known as “Cas13a”)); type VI-B CRISPR/Cas proteins (e.g., Cas13b (also known as C2c4)); and type VI-C CRISPR/Cas proteins (e.g., Cas13c (also known as C2c7)). To date, class 2 CRISPR/Cas proteins encompass type II, type V, and type VI CRISPR/Cas proteins, but the term is also meant to encompass any class 2 CRISPR/Cas protein suitable for binding to a corresponding guide RNA and forming an RNP complex.

### Type II CRISPR/Cas Endonucleases (e.g., Cas 9)

[0103] In natural Type II CRISPR/Cas systems, Cas9 functions as an RNA-guided endonuclease that uses a dual-guide RNA having a crRNA and trans-activating crRNA (tracrRNA) for target recognition and cleavage by a mechanism involving two nuclease active sites in Cas9 that together generate double-stranded DNA breaks (DSBs), or can individually generate single-stranded DNA breaks (SSBs). The Type II CRISPR endonuclease Cas9 and engineered dual-(dgRNA) or single guide RNA (sgRNA) form a ribonucleoprotein (RNP) complex that can be targeted to a desired DNA sequence. Guided by a dual-RNA complex or a chimeric single-guide RNA, Cas9 generates site-specific DSBs or SSBs within double-stranded DNA (dsDNA) target nucleic acids, which are repaired either by non-homologous end joining (NHEJ) or homology-directed recombination (HDR).

[0104] A type II CRISPR/Cas endonuclease is a type of class 2 CRISPR/Cas endonuclease. In some cases, the type II CRISPR/Cas endonuclease is a Cas9 protein. A Cas9 protein forms a complex with a Cas9 guide RNA. The guide RNA provides target specificity to a Cas9-guide RNA complex by having a nucleotide sequence (a guide sequence) that is complementary to a sequence (the target site) of a target nucleic acid (as described elsewhere herein). The Cas9 protein of the complex provides the site-specific activity. In other words, the Cas9 protein is guided to a target site (e.g., stabilized at a target site) within a target nucleic acid sequence (e.g. a chromosomal sequence or an extrachromosomal sequence, e.g., an episomal sequence, a minicircle sequence, a mitochondrial sequence, a chloroplast sequence, etc.) by virtue of its association with the protein-binding segment of the Cas9 guide RNA.

[0105] A Cas9 protein can bind and/or modify (e.g., cleave, nick, methylate, demethylate, etc.) a target nucleic acid and/or a polypeptide associated with target nucleic acid (e.g., methylation or acetylation of a histone tail)(e.g., when the Cas9 protein includes a fusion partner with an activity). In some cases, the Cas9 protein is a naturally-occurring protein (e.g., naturally occurs in bacterial and/or archaeal cells). In other cases, the Cas9 protein is not a naturally-occurring polypeptide (e.g., the Cas9 protein is a variant Cas9 protein, a chimeric protein, and the like).

[0106] Examples of suitable Cas9 proteins include, but are not limited to, those set forth in SEQ ID NOs: 5-816. Naturally occurring Cas9 proteins bind a Cas9 guide RNA, are thereby directed to a specific sequence within a target nucleic acid (a target site), and cleave the target nucleic acid (e.g., cleave dsDNA to generate a double strand break, cleave ssDNA, cleave ssRNA, etc.). A chimeric Cas9 protein is a fusion protein comprising a Cas9 polypeptide that is fused to a heterologous protein (referred to as a fusion partner), where the heterologous protein provides an activity (e.g., one that is not provided by the Cas9 protein). The fusion partner can provide an activity, e.g., enzymatic activity (e.g., nuclease activity, activity for DNA and/or RNA methylation, activity for DNA and/or RNA cleavage, activity for histone acetylation, activity for histone methylation, activity for RNA modification, activity for RNA-binding, activity for RNA splicing etc.). In some cases, a portion of the Cas9 protein (e.g., the RuvC domain and/or the HNH domain) exhibits reduced nuclease activity relative to the corresponding portion of a wild type Cas9 protein (e.g., in some cases the Cas9 protein is a nickase). In some cases, the Cas9 protein is enzymatically inactive, or has reduced enzymatic activity relative to a wild-type Cas9 protein (e.g., relative to Streptococcus pyogenes Cas9).

[0107] In some cases, a fusion protein comprises: a) a catalytically inactive Cas9 protein (or other catalytically inactive CRISPR effector polypeptide); and b) a catalytically active endonuclease. For example, in some cases, the catalytically active endonuclease is a FokI polypeptide. As one non-limiting example, in some cases, a fusion protein comprises: a) a catalytically inactive Cas9 protein (or other catalytically inactive CRISPR effector polypeptide); and b) is a FokI nuclease comprising an amino acid sequence having at least at least 85%, at least 90%, at least 95%, at least 98%, at least 99%, or 100%, amino acid sequence identity to the Fold amino acid sequence provided below; where the FokI nuclease has a length of from about 195 amino acids to about 200 amino acids.

[0108] FokI Nuclease Amino Acid Sequence:

(SEQ ID NO: 1214)
QLVKSELEEKKSELRHKLKYVPHEYIELIEIARNSTQDRILEMKVMEFFMK
VYGYRGKHLGGSRKPDGAIYTVGSPIDYGVIVDTKAYSGGYNLPIGQADEM
QRYVEENQTRNKHINPNEWWKVYPSSVTEFKFLFVSGHFKGNYKAQLTRLN
HITNCNGAVLSVEELLIGGEMIKAGTLTLEEVRRKFNNGEINF.

[0109] Assays to determine whether given protein interacts with a Cas9 guide RNA can be any convenient binding assay that tests for binding between a protein and a nucleic acid. Suitable binding assays (e.g., gel shift assays) will be known to one of ordinary skill in the art (e.g., assays that include adding a Cas9 guide RNA and a protein to a target nucleic acid).

[0110] Assays to determine whether a protein has an activity (e.g., to determine if the protein has nuclease activity that cleaves a target nucleic acid and/or some heterologous activity) can be any convenient assay (e.g., any convenient nucleic acid cleavage assay that tests for nucleic acid cleavage). Suitable assays (e.g., cleavage assays) will be known to one of ordinary skill in the art and can include adding a Cas9 guide RNA and a protein to a target nucleic acid.

[0111] Many Cas9 orthologs from a wide variety of species have been identified and in some cases the proteins share only a few identical amino acids. Identified Cas9 orthologs have similar domain architecture with a central HNH endonuclease domain and a split RuvC/RNaseH domain (e.g., RuvCI, RuvCII, and RuvCIII) (e.g., see Table 1). For example, a Cas9 protein can have 3 different regions (sometimes referred to as RuvC-I, RuvC-II, and RucC-III), that are not contiguous with respect to the primary amino acid sequence of the Cas9 protein, but fold together to form a RuvC domain once the protein is produced and folds. Thus, Cas9 proteins can be said to share at least 4 key motifs with a conserved architecture. Motifs 1, 2, and 4 are RuvC like motifs while motif 3 is an HNH-motif. The motifs set forth in Table 1 may not represent the entire RuvC-like and/or HNH domains as accepted in the art, but Table 1 does present motifs that can be used to help determine whether a given protein is a Cas9 protein.

TABLE 1
Table 1 lists 4 motifs that are present in Cas9
sequences from various species. The amino acids
listed in Table 1 are from the Cas9 from
S. pyogenes (SEQ ID NO: 5).

| Motif | | Amino acids | Highly |
|---|---|---|---|
| # | Motif | (residue #s) | conserved |
| 1 | RuvC-like | IGLDIGTNSVGWAVI | D10, G12, |
| | I | (7-21) | G17 |
| | | (SEQ ID NO: 1) | |
| 2 | RuvC-like | IVIEMARE (759-766) | E762 |
| | II | (SEQ ID NO: 2) | |
| 3 | HNH-motif | DVDHIVPQSFLKDDSIDN | H840, N854, |
| | | KVLTRSDKN (837-863) | N863 |
| | | (SEQ ID NO: 3) | |
| 4 | RuvC-like | HHAHDAYL (982-989) | H982, H983, |
| | III | (SEQ ID NO: 4) | A984, D986, |
| | | | A987 |

[0112] In some cases, a suitable Cas9 protein comprises an amino acid sequence having 4 motifs, each of motifs 1-4 having 60% or more, 70% or more, 75% or more, 80% or more, 85% or more, 90% or more, 95% or more, 99% or more or 100% amino acid sequence identity to motifs 1-4 as set forth in SEQ ID NOs: 1-4, respectively (e.g., see Table 1), or to the corresponding portions in any of the amino acid sequences set forth in SEQ ID NOs: 5-816.

[0113] In other words, in some cases, a suitable Cas9 polypeptide comprises an amino acid sequence having 4 motifs, each of motifs 1-4 having 60% or more, 70% or more, 75% or more, 80% or more, 85% or more, 90% or more, 95% or more, 99% or more or 100% amino acid sequence identity to motifs 1-4 of the Cas9 amino acid sequence set forth in SEQ ID NO: 5 (e.g., the sequences set forth in SEQ ID NOs: 1-4, e.g., see Table 1), or to the corresponding portions in any of the amino acid sequences set forth in SEQ ID NOs: 6-816.

[0114] In some cases, a suitable Cas9 protein comprises an amino acid sequence having 4 motifs, each of motifs 1-4 having 60% or more amino acid sequence identity to motifs 1-4 of the Cas9 amino acid sequence set forth as SEQ ID NO: 5 (the motifs are in Table 1, and are set forth as SEQ ID NOs: 1-4, respectively), or to the corresponding portions in any of the amino acid sequences set forth in SEQ ID NOs: 6-816. In some cases, a suitable Cas9 protein comprises an amino acid sequence having 4 motifs, each of motifs 1-4 having 70% or more amino acid sequence identity to motifs 1-4 of the Cas9 amino acid sequence set forth as SEQ ID NO: 5 (the motifs are in Table 1, and are set forth as SEQ ID NOs: 1-4, respectively), or to the corresponding portions in any of the amino acid sequences set forth in SEQ ID NOs: 6-816. In some cases, a suitable Cas9 protein comprises an amino acid sequence having 4 motifs, each of motifs 1-4 having 75% or more amino acid sequence identity to motifs 1-4 of the Cas9 amino acid sequence set forth as SEQ ID NO: 5 (the motifs are in Table 1, and are set forth as SEQ ID NOs: 1-4, respectively), or to the corresponding portions in any of the amino acid sequences set forth in SEQ ID NOs: 6-816. In some cases, a suitable Cas9 protein comprises an amino acid sequence having 4 motifs, each of motifs 1-4 having 80% or more amino acid sequence identity to motifs 1-4 of the Cas9 amino acid sequence set forth as SEQ ID NO: 5 (the motifs are in Table 1, and are set forth as SEQ ID NOs: 1-4, respectively), or to the corresponding portions in any of the amino acid sequences set forth in SEQ ID NOs: 6-816. In some cases, a suitable Cas9 protein comprises an amino acid sequence having 4 motifs, each of motifs 1-4 having 85% or more amino acid sequence identity to motifs 1-4 of the Cas9 amino acid sequence set forth as SEQ ID NO: 5 (the motifs are in Table 1, and are set forth as SEQ ID NOs: 1-4, respectively), or to the corresponding portions in any of the amino acid sequences set forth in SEQ ID NOs: 6-816. In some cases, a suitable Cas9 protein comprises an amino acid sequence having 4 motifs, each of motifs 1-4 having 90% or more amino acid sequence identity to motifs 1-4 of the Cas9 amino acid sequence set forth as SEQ ID NO: 5 (the motifs are in Table 1, and are set forth as SEQ ID NOs: 1-4, respectively), or to the corresponding portions in any of the amino acid sequences set forth in SEQ ID NOs: 6-816. In some cases, a suitable Cas9 protein comprises an amino acid sequence having 4 motifs, each of motifs 1-4 having 95% or more amino acid sequence identity to motifs 1-4 of the Cas9 amino acid sequence set forth as SEQ ID NO: 5 (the motifs are in Table 1, and are set forth as SEQ ID NOs: 1-4, respectively), or to the corresponding portions in any of the amino acid sequences set forth in SEQ ID NOs: 6-816. In some cases, a suitable Cas9 protein comprises an amino acid sequence having 4 motifs, each of motifs 1-4 having 99% or more amino acid sequence identity to motifs 1-4 of the Cas9 amino acid sequence set forth as SEQ ID NO: 5 (the motifs are in Table 1, and are set forth as SEQ ID NOs: 1-4, respectively), or to the corresponding portions in any of the amino acid sequences set forth in SEQ ID NOs: 6-816. In some cases, a suitable Cas9 protein comprises an amino acid sequence having 4 motifs, each of motifs 1-4 having 100% amino acid sequence identity to motifs 1-4 of the Cas9 amino acid sequence set forth as SEQ ID NO: 5 (the motifs are in Table 1, and are set forth as SEQ ID NOs: 1-4, respectively), or to the corresponding portions in any of the amino acid sequences set forth in SEQ ID NOs: 6-816. Any Cas9 protein as defined above can be used as a Cas9 polypeptide, as part of a chimeric Cas9 polypeptide (e.g., a Cas9 fusion protein), any of which can be used in an RNP of the present disclosure.

[0115] In some cases, a suitable Cas9 protein comprises an amino acid sequence having 60% or more, 70% or more, 75% or more, 80% or more, 85% or more, 90% or more, 95% or more, 99% or more or 100% amino acid sequence identity to amino acids 7-166 or 731-1003 of the Cas9 amino acid sequence set forth in SEQ ID NO: 5, or to the corresponding portions in any of the amino acid sequences set forth as SEQ ID NOs: 6-816.

[0116] In some cases, a suitable Cas9 protein comprises an amino acid sequence having 60% or more amino acid sequence identity to amino acids 7-166 or 731-1003 of the Cas9 amino acid sequence set forth in SEQ ID NO: 5, or to the corresponding portions in any of the amino acid sequences set forth as SEQ ID NOs: 6-816. In some cases, a suitable Cas9 protein comprises an amino acid sequence having 70% or more amino acid sequence identity to amino acids 7-166 or 731-1003 of the Cas9 amino acid sequence set forth in SEQ ID NO: 5, or to the corresponding portions in any of the amino acid sequences set forth as SEQ ID NOs: 6-816. In some cases, a suitable Cas9 protein comprises an amino acid sequence having 75% or more amino acid sequence identity to amino acids 7-166 or 731-1003 of the Cas9 amino acid sequence set forth in SEQ ID NO: 5, or to the corresponding portions in any of the amino acid sequences set forth as SEQ ID NOs: 6-816. In some cases, a suitable Cas9 protein comprises an amino acid sequence having 80% or more amino acid sequence identity to amino acids 7-166 or 731-1003 of the Cas9 amino acid sequence set forth in SEQ ID NO: 5, or to the corresponding portions in any of the amino acid sequences set forth as SEQ ID NOs: 6-816. In some cases, a suitable Cas9 protein comprises an amino acid sequence having 85% or more amino acid sequence identity to amino acids 7-166 or 731-1003 of the Cas9 amino acid sequence set forth in SEQ ID NO: 5, or to the corresponding portions in any of the amino acid sequences set forth as SEQ ID NOs: 6-816. In some cases, a suitable Cas9 protein comprises an amino acid sequence having 90% or more amino acid sequence identity to amino acids 7-166 or 731-1003 of the Cas9 amino acid sequence set forth in SEQ ID NO: 5, or to the corresponding portions in any of the amino acid sequences set forth as SEQ ID NOs: 6-816. In some cases, a suitable Cas9 protein comprises an amino acid sequence having 95% or more amino acid sequence identity to amino acids 7-166 or 731-1003 of the Cas9 amino acid sequence set forth in SEQ ID NO: 5, or to the corresponding portions in any of the amino acid sequences set forth as SEQ ID NOs: 6-816. In some cases, a suitable Cas9 protein comprises an amino acid sequence having 99% or more amino acid sequence identity to amino acids 7-166 or 731-1003 of the Cas9 amino acid sequence set forth in SEQ ID NO: 5, or to the corresponding portions in any of the amino acid sequences set forth as SEQ ID NOs: 6-816. In some cases, a suitable Cas9 protein comprises an amino acid sequence having 100% amino acid sequence identity to amino acids 7-166 or 731-1003 of the Cas9 amino acid sequence set forth in SEQ ID NO: 5, or to the corresponding portions in any of the amino acid sequences set forth as SEQ ID NOs: 6-816. Any Cas9 protein as defined above can be used as a Cas9 polypeptide, as part of a chimeric Cas9 polypeptide (e.g., a Cas9 fusion protein), any of which can be used in an RNP of the present disclosure.

[0117] In some cases, a suitable Cas9 protein comprises an amino acid sequence having 60% or more, 70% or more, 75% or more, 80% or more, 85% or more, 90% or more, 95% or more, 99% or more or 100% amino acid sequence identity to the Cas9 amino acid sequence set forth in SEQ ID NO: 5, or to any of the amino acid sequences set forth as SEQ ID NOs: 6-816.

[0118] In some cases, a suitable Cas9 protein comprises an amino acid sequence having 60% or more amino acid sequence identity to the Cas9 amino acid sequence set forth in SEQ ID NO: 5, or to any of the amino acid sequences set forth as SEQ ID NOs: 6-816. In some cases, a suitable Cas9 protein comprises an amino acid sequence having 70% or more amino acid sequence identity to the Cas9 amino acid sequence set forth in SEQ ID NO: 5, or to any of the amino acid sequences set forth as SEQ ID NOs: 6-816. In some cases, a suitable Cas9 protein comprises an amino acid sequence having 75% or more amino acid sequence identity to the Cas9 amino acid sequence set forth in SEQ ID NO: 5, or to any of the amino acid sequences set forth as SEQ ID NOs: 6-816. In some cases, a suitable Cas9 protein comprises an amino acid sequence having 80% or more amino acid sequence identity to the Cas9 amino acid sequence set forth in SEQ ID NO: 5, or to any of the amino acid sequences set forth as SEQ ID NOs: 6-816. In some cases, a suitable Cas9 protein comprises an amino acid sequence having 85% or more amino acid sequence identity to the Cas9 amino acid sequence set forth in SEQ ID NO: 5, or to any of the amino acid sequences set forth as SEQ ID NOs: 6-816. In some cases, a suitable Cas9 protein comprises an amino acid sequence having 90% or more amino acid sequence identity to the Cas9 amino acid sequence set forth in SEQ ID NO: 5, or to any of the amino acid sequences set forth as SEQ ID NOs: 6-816. In some cases, a suitable Cas9 protein comprises an amino acid sequence having 95% or more amino acid sequence identity to the Cas9 amino acid sequence set forth in SEQ ID NO: 5, or to any of the amino acid sequences set forth as SEQ ID NOs: 6-816. In some cases, a suitable Cas9 protein comprises an amino acid sequence having 99% or more amino acid sequence identity to the Cas9 amino acid sequence set forth in SEQ ID NO: 5, or to any of the amino acid sequences set forth as SEQ ID NOs: 6-816. In some cases, a suitable Cas9 protein comprises an amino acid sequence having 100% amino acid sequence identity to the Cas9 amino acid sequence set forth in SEQ ID NO: 5, or to any of the amino acid sequences set forth as SEQ ID NOs: 6-816. Any Cas9 protein as defined above can be used as a Cas9 polypeptide, as part of a chimeric Cas9 polypeptide (e.g., a Cas9 fusion protein), any of which can be used in an RNP of the present disclosure.

[0119] In some cases, a Cas9 protein comprises 4 motifs (as listed in Table 1), at least one with (or each with) amino acid sequences having 75% or more, 80% or more, 85% or more, 90% or more, 95% or more, 99% or more or 100% amino acid sequence identity to each of the 4 motifs listed in Table 1 (SEQ ID NOs:1-4), or to the corresponding portions in any of the amino acid sequences set forth as SEQ ID NOs: 6-816.

[0120] Examples of various Cas9 proteins (and Cas9 domain structure) and Cas9 guide RNAs (as well as information regarding requirements related to protospacer adjacent motif (PAM) sequences present in targeted nucleic acids) can be found in the art, for example, see Jinek et al., Science. 2012 Aug. 17; 337(6096):816-21; Chylinski et al., RNA Biol. 2013 May; 10(5):726-37; Ma et al., Biomed Res Int. 2013; 2013:270805; Hou et al., Proc Natl Acad Sci USA. 2013 Sep. 24; 110(39):15644-9; Jinek et al., Elife. 2013; 2:e00471; Pattanayak et al., Nat Biotechnol. 2013 September; 31(9):839-43; Qi et al., Cell. 2013 Feb. 28; 152(5):1173-83; Wang et al., Cell. 2013 May 9; 153(4):910-8; Auer et al., Genome Res. 2013 Oct. 31; Chen et al., Nucleic Acids Res. 2013 Nov. 1; 41(20):e19; Cheng et al., Cell Res. 2013 October; 23(10):1163-71; Cho et al., Genetics. 2013 November; 195(3):1177-80; DiCarlo et al., Nucleic Acids Res. 2013 April; 41(7):4336-43; Dickinson et al., Nat Methods. 2013 October; 10(10):1028-34; Ebina et al., Sci Rep. 2013; 3:2510; Fujii et al., Nucleic Acids Res. 2013 Nov. 1; 41(20):e187; Hu et al., Cell Res. 2013 November; 23(11):1322-5; Jiang et al., Nucleic Acids Res. 2013 Nov. 1; 41(20):e188; Larson et al., Nat Protoc. 2013 November; 8(11):2180-96; Mali et al., Nat Methods. 2013 October; 10(10):957-63; Nakayama et al., Genesis. 2013 December; 51(12):835-43; Ran et al., Nat Protoc. 2013 November; 8(11):2281-308; Ran et al., Cell. 2013 Sep. 12; 154(6):1380-9; Upadhyay et al., G3 (Bethesda). 2013 Dec. 9; 3(12):2233-8; Walsh et al., Proc Natl Acad Sci USA. 2013 Sep. 24; 110(39):15514-5; Xie et al., Mol Plant. 2013 Oct. 9; Yang et al., Cell. 2013 Sep. 12; 154(6):1370-9; Briner et al., Mol Cell. 2014 Oct. 23; 56(2):333-9; Shmakov et al., Nat Rev Microbiol. 2017 March; 15(3):169-182; and U.S. patents and patent applications: U.S. Pat. Nos. 8,906,616; 8,895,308; 8,889,418; 8,889,356; 8,871,445; 8,865,406; 8,795,965; 8,771,945; 8,697,359; 20140068797; 20140170753; 20140179006; 20140179770; 20140186843; 20140186919; 20140186958; 20140189896; 20140227787; 20140234972; 20140242664; 20140242699; 20140242700; 20140242702; 20140248702; 20140256046; 20140273037; 20140273226; 20140273230; 20140273231; 20140273232; 20140273233; 20140273234; 20140273235; 20140287938; 20140295556; 20140295557; 20140298547; 20140304853; 20140309487; 20140310828; 20140310830; 20140315985; 20140335063; 20140335620; 20140342456; 20140342457; 20140342458; 20140349400; 20140349405; 20140356867; 20140356956; 20140356958; 20140356959; 20140357523; 20140357530; 20140364333; and 20140377868; each of which is hereby incorporated by reference in its entirety.

Variant Cas9 Proteins—Nickases and dCas9

[0121] In some cases, a Cas9 protein is a variant Cas9 protein. A variant Cas9 protein has an amino acid sequence that is different by at least one amino acid (e.g., has a deletion, insertion, substitution, fusion) when compared to the amino acid sequence of a corresponding wild type Cas9 protein. In some instances, the variant Cas9 protein has an amino acid change (e.g., deletion, insertion, or substitution) that reduces the nuclease activity of the Cas9 protein. For example, in some instances, the variant Cas9 protein has 50% or less, 40% or less, 30% or less, 20% or less, 10% or less, 5% or less, or 1% or less of the nuclease activity of the corresponding wild-type Cas9 protein. In some cases, the variant Cas9 protein has no substantial nuclease activity. When a Cas9 protein is a variant Cas9 protein that has no substantial nuclease activity, it can be referred to as a nuclease defective Cas9 protein or “dCas9” for “dead” Cas9. A protein (e.g., a class 2 CRISPR/Cas protein, e.g., a Cas9 protein) that cleaves one strand but not the other of a double stranded target nucleic acid is referred to herein as a “nickase” (e.g., a “nickase Cas9”).

[0122] In some cases, a variant Cas9 protein can cleave the complementary strand (sometimes referred to in the art as the target strand) of a target nucleic acid but has reduced ability to cleave the non-complementary strand (sometimes referred to in the art as the non-target strand) of a target nucleic acid. For example, the variant Cas9 protein can have a mutation (amino acid substitution) that reduces the function of the RuvC domain. Thus, the Cas9 protein can be a nickase that cleaves the complementary strand, but does not cleave the non-complementary strand. As a non-limiting example, in some embodiments, a variant Cas9 protein has a mutation at an amino acid position corresponding to residue D10 (e.g., D10A, aspartate to alanine) of SEQ ID NO: 5 (or the corresponding position of any of the proteins set forth in SEQ ID NOs: 6-261 and 264-816) and can therefore cleave the complementary strand of a double stranded target nucleic acid but has reduced ability to cleave the non-complementary strand of a double stranded target nucleic acid (thus resulting in a single strand break (SSB) instead of a double strand break (DSB) when the variant Cas9 protein cleaves a double stranded target nucleic acid) (see, for example, Jinek et al., Science. 2012 Aug. 17; 337(6096):816-21). See, e.g., SEQ ID NO: 262.

[0123] In some cases, a variant Cas9 protein can cleave the non-complementary strand of a target nucleic acid but has reduced ability to cleave the complementary strand of the target nucleic acid. For example, the variant Cas9 protein can have a mutation (amino acid substitution) that reduces the function of the HNH domain Thus, the Cas9 protein can be a nickase that cleaves the non-complementary strand, but does not cleave the complementary strand. As a non-limiting example, in some embodiments, the variant Cas9 protein has a mutation at an amino acid position corresponding to residue H840 (e.g., an H840A mutation, histidine to alanine) of SEQ ID NO: 5 (or the corresponding position of any of the proteins set forth as SEQ ID NOs: 6-261 and 264-816) and can therefore cleave the non-complementary strand of the target nucleic acid but has reduced ability to cleave (e.g., does not cleave) the complementary strand of the target nucleic acid. Such a Cas9 protein has a reduced ability to cleave a target nucleic acid (e.g., a single stranded target nucleic acid) but retains the ability to bind a target nucleic acid (e.g., a single stranded target nucleic acid). See, e.g., SEQ ID NO: 263.

[0124] In some cases, a variant Cas9 protein has a reduced ability to cleave both the complementary and the non-complementary strands of a double stranded target nucleic acid. As a non-limiting example, in some cases, the variant Cas9 protein harbors mutations at amino acid positions corresponding to residues D10 and H840 (e.g., D10A and H840A) of SEQ ID NO: 5 (or the corresponding residues of any of the proteins set forth as SEQ ID NOs: 6-261 and 264-816) such that the polypeptide has a reduced ability to cleave (e.g., does not cleave) both the complementary and the non-complementary strands of a target nucleic acid. Such a Cas9 protein has a reduced ability to cleave a target nucleic acid (e.g., a single stranded or double stranded target nucleic acid) but retains the ability to bind a target nucleic acid. A Cas9 protein that cannot cleave target nucleic acid (e.g., due to one or more mutations, e.g., in the catalytic domains of the RuvC and HNH domains) is referred to as a “dead” Cas9 or simply “dCas9.” See, e.g., SEQ ID NO: 264.

[0125] Other residues can be mutated to achieve the above effects (i.e. inactivate one or the other nuclease portions). As non-limiting examples, residues D10, G12, G17, E762, H840, N854, N863, H982, H983, A984, D986, and/or A987 of SEQ ID NO: 5 (or the corresponding mutations of any of the proteins set forth as SEQ ID NOs: 6-816) can be altered (i.e., substituted). Also, mutations other than alanine substitutions are suitable.

[0126] In some embodiments, a variant Cas9 protein that has reduced catalytic activity (e.g., when a Cas9 protein has a D10, G12, G17, E762, H840, N854, N863, H982, H983, A984, D986, and/or a A987 mutation of SEQ ID NO: 5 or the corresponding mutations of any of the proteins set forth as SEQ ID NOs: 6-816, e.g., D10A, G12A, G17A, E762A, H840A, N854A, N863A, H982A, H983A, A984A, and/or D986A), the variant Cas9 protein can still bind to target nucleic acid in a site-specific manner (because it is still guided to a target nucleic acid sequence by a Cas9 guide RNA) as long as it retains the ability to interact with the Cas9 guide RNA.

[0127] In addition to the above, a variant Cas9 protein can have the same parameters for sequence identity as described above for Cas9 proteins. Thus, in some cases, a suitable variant Cas9 protein comprises an amino acid sequence having 4 motifs, each of motifs 1-4 having 60% or more, 70% or more, 75% or more, 80% or more, 85% or more, 90% or more, 95% or more, 99% or more or 100% amino acid sequence identity to motifs 1-4 of the Cas9 amino acid sequence set forth as SEQ ID NO: 5 (the motifs are in Table 1, above, and are set forth as SEQ ID NOs: 1-4, respectively), or to the corresponding portions in any of the amino acid sequences set forth in SEQ ID NOs: 6-816.

[0128] In some cases, a suitable variant Cas9 protein comprises an amino acid sequence having 4 motifs, each of motifs 1-4 having 60% or more amino acid sequence identity to motifs 1-4 of the Cas9 amino acid sequence set forth as SEQ ID NO: 5 (the motifs are in Table 1, above, and are set forth as SEQ ID NOs: 1-4, respectively), or to the corresponding portions in any of the amino acid sequences set forth in SEQ ID NOs: 6-816. In some cases, a suitable variant Cas9 protein comprises an amino acid sequence having 4 motifs, each of motifs 1-4 having 70% or more amino acid sequence identity to motifs 1-4 of the Cas9 amino acid sequence set forth as SEQ ID NO: 5 (the motifs are in Table 1, above, and are set forth as SEQ ID NOs: 1-4, respectively), or to the corresponding portions in any of the amino acid sequences set forth in SEQ ID NOs: 6-816. In some cases, a suitable variant Cas9 protein comprises an amino acid sequence having 4 motifs, each of motifs 1-4 having 75% or more amino acid sequence identity to motifs 1-4 of the Cas9 amino acid sequence set forth as SEQ ID NO: 5 (the motifs are in Table 1, above, and are set forth as SEQ ID NOs: 1-4, respectively), or to the corresponding portions in any of the amino acid sequences set forth in SEQ ID NOs: 6-816. In some cases, a suitable variant Cas9 protein comprises an amino acid sequence having 4 motifs, each of motifs 1-4 having 80% or more amino acid sequence identity to motifs 1-4 of the Cas9 amino acid sequence set forth as SEQ ID NO: 5 (the motifs are in Table 1, above, and are set forth as SEQ ID NOs: 1-4, respectively), or to the corresponding portions in any of the amino acid sequences set forth in SEQ ID NOs: 6-816. In some cases, a suitable variant Cas9 protein comprises an amino acid sequence having 4 motifs, each of motifs 1-4 having 85% or more amino acid sequence identity to motifs 1-4 of the Cas9 amino acid sequence set forth as SEQ ID NO: 5 (the motifs are in Table 1, above, and are set forth as SEQ ID NOs: 1-4, respectively), or to the corresponding portions in any of the amino acid sequences set forth in SEQ ID NOs: 6-816. In some cases, a suitable variant Cas9 protein comprises an amino acid sequence having 4 motifs, each of motifs 1-4 having 90% or more amino acid sequence identity to motifs 1-4 of the Cas9 amino acid sequence set forth as SEQ ID NO: 5 (the motifs are in Table 1, above, and are set forth as SEQ ID NOs: 1-4, respectively), or to the corresponding portions in any of the amino acid sequences set forth in SEQ ID NOs: 6-816. In some cases, a suitable variant Cas9 protein comprises an amino acid sequence having 4 motifs, each of motifs 1-4 having 95% or more amino acid sequence identity to motifs 1-4 of the Cas9 amino acid sequence set forth as SEQ ID NO: 5 (the motifs are in Table 1, above, and are set forth as SEQ ID NOs: 1-4, respectively), or to the corresponding portions in any of the amino acid sequences set forth in SEQ ID NOs: 6-816. In some cases, a suitable variant Cas9 protein comprises an amino acid sequence having 4 motifs, each of motifs 1-4 having 99% or more amino acid sequence identity to motifs 1-4 of the Cas9 amino acid sequence set forth as SEQ ID NO: 5 (the motifs are in Table 1, above, and are set forth as SEQ ID NOs: 1-4, respectively), or to the corresponding portions in any of the amino acid sequences set forth in SEQ ID NOs: 6-816. In some cases, a suitable variant Cas9 protein comprises an amino acid sequence having 4 motifs, each of motifs 1-4 having 100% amino acid sequence identity to motifs 1-4 of the Cas9 amino acid sequence set forth as SEQ ID NO: 5 (the motifs are in Table 1, above, and are set forth as SEQ ID NOs: 1-4, respectively), or to the corresponding portions in any of the amino acid sequences set forth in SEQ ID NOs: 6-816.

[0129] In some cases, a suitable variant Cas9 protein comprises an amino acid sequence having 60% or more, 70% or more, 75% or more, 80% or more, 85% or more, 90% or more, 95% or more, 99% or more, or 100% amino acid sequence identity to amino acids 7-166 or 731-1003 of the Cas9 amino acid sequence set forth in SEQ ID NO: 5, or to the corresponding portions in any of the amino acid sequences set forth as SEQ ID NOs: 6-816.

[0130] In some cases, a suitable variant Cas9 protein comprises an amino acid sequence having 60% or more amino acid sequence identity to amino acids 7-166 or 731-1003 of the Cas9 amino acid sequence set forth in SEQ ID NO: 5, or to the corresponding portions in any of the amino acid sequences set forth as SEQ ID NOs: 6-816. In some cases, a suitable variant Cas9 protein comprises an amino acid sequence having 70% or more amino acid sequence identity to amino acids 7-166 or 731-1003 of the Cas9 amino acid sequence set forth in SEQ ID NO: 5, or to the corresponding portions in any of the amino acid sequences set forth as SEQ ID NOs: 6-816. In some cases, a suitable variant Cas9 protein comprises an amino acid sequence having 75% or more amino acid sequence identity to amino acids 7-166 or 731-1003 of the Cas9 amino acid sequence set forth in SEQ ID NO: 5, or to the corresponding portions in any of the amino acid sequences set forth as SEQ ID NOs: 6-816. In some cases, a suitable variant Cas9 protein comprises an amino acid sequence having 80% or more amino acid sequence identity to amino acids 7-166 or 731-1003 of the Cas9 amino acid sequence set forth in SEQ ID NO: 5, or to the corresponding portions in any of the amino acid sequences set forth as SEQ ID NOs: 6-816. In some cases, a suitable variant Cas9 protein comprises an amino acid sequence having 85% or more amino acid sequence identity to amino acids 7-166 or 731-1003 of the Cas9 amino acid sequence set forth in SEQ ID NO: 5, or to the corresponding portions in any of the amino acid sequences set forth as SEQ ID NOs: 6-816. In some cases, a suitable variant Cas9 protein comprises an amino acid sequence having 90% or more amino acid sequence identity to amino acids 7-166 or 731-1003 of the Cas9 amino acid sequence set forth in SEQ ID NO: 5, or to the corresponding portions in any of the amino acid sequences set forth as SEQ ID NOs: 6-816. In some cases, a suitable variant Cas9 protein comprises an amino acid sequence having 95% or more amino acid sequence identity to amino acids 7-166 or 731-1003 of the Cas9 amino acid sequence set forth in SEQ ID NO: 5, or to the corresponding portions in any of the amino acid sequences set forth as SEQ ID NOs: 6-816. In some cases, a suitable variant Cas9 protein comprises an amino acid sequence having 99% or more amino acid sequence identity to amino acids 7-166 or 731-1003 of the Cas9 amino acid sequence set forth in SEQ ID NO: 5, or to the corresponding portions in any of the amino acid sequences set forth as SEQ ID NOs: 6-816. In some cases, a suitable variant Cas9 protein comprises an amino acid sequence having 100% amino acid sequence identity to amino acids 7-166 or 731-1003 of the Cas9 amino acid sequence set forth in SEQ ID NO: 5, or to the corresponding portions in any of the amino acid sequences set forth as SEQ ID NOs: 6-816.

[0131] In some cases, a suitable variant Cas9 protein comprises an amino acid sequence having 60% or more, 70% or more, 75% or more, 80% or more, 85% or more, 90% or more, 95% or more, 99% or more, or 100% amino acid sequence identity to the Cas9 amino acid sequence set forth in SEQ ID NO: 5, or to any of the amino acid sequences set forth as SEQ ID NOs: 6-816. In some cases, a suitable variant Cas9 protein comprises an amino acid sequence having 60% or more amino acid sequence identity to the Cas9 amino acid sequence set forth in SEQ ID NO: 5, or to any of the amino acid sequences set forth as SEQ ID NOs: 6-816. In some cases, a suitable variant Cas9 protein comprises an amino acid sequence having 70% or more amino acid sequence identity to the Cas9 amino acid sequence set forth in SEQ ID NO: 5, or to any of the amino acid sequences set forth as SEQ ID NOs: 6-816. In some cases, a suitable variant Cas9 protein comprises an amino acid sequence having 75% or more amino acid sequence identity to the Cas9 amino acid sequence set forth in SEQ ID NO: 5, or to any of the amino acid sequences set forth as SEQ ID NOs: 6-816. In some cases, a suitable variant Cas9 protein comprises an amino acid sequence having 80% or more amino acid sequence identity to the Cas9 amino acid sequence set forth in SEQ ID NO: 5, or to any of the amino acid sequences set forth as SEQ ID NOs: 6-816. In some cases, a suitable variant Cas9 protein comprises an amino acid sequence having 85% or more amino acid sequence identity to the Cas9 amino acid sequence set forth in SEQ ID NO: 5, or to any of the amino acid sequences set forth as SEQ ID NOs: 6-816. In some cases, a suitable variant Cas9 protein comprises an amino acid sequence having 90% or more amino acid sequence identity to the Cas9 amino acid sequence set forth in SEQ ID NO: 5, or to any of the amino acid sequences set forth as SEQ ID NOs: 6-816. In some cases, a suitable variant Cas9 protein comprises an amino acid sequence having 95% or more amino acid sequence identity to the Cas9 amino acid sequence set forth in SEQ ID NO: 5, or to any of the amino acid sequences set forth as SEQ ID NOs: 6-816. In some cases, a suitable variant Cas9 protein comprises an amino acid sequence having 99% or more amino acid sequence identity to the Cas9 amino acid sequence set forth in SEQ ID NO: 5, or to any of the amino acid sequences set forth as SEQ ID NOs: 6-816. In some cases, a suitable variant Cas9 protein comprises an amino acid sequence having 100% amino acid sequence identity to the Cas9 amino acid sequence set forth in SEQ ID NO: 5, or to any of the amino acid sequences set forth as SEQ ID NOs: 6-816.

### Type V and Type VI CRISPR/Cas Endonucleases

[0132] In some cases, a genome targeting composition of the present disclosure includes a type V or type VI CRISPR/Cas endonuclease (i.e., the genome editing endonuclease is a type V or type VI CRISPR/Cas endonuclease) (e.g., Cpf1, C2c1, C2c2, C2c3). Type V and type VI CRISPR/Cas endonucleases are a type of class 2 CRISPR/Cas endonuclease. Examples of type V CRISPR/Cas endonucleases include but are not limited to: Cpf1, C2c1, and C2c3. An example of a type VI CRISPR/Cas endonuclease is C2c2. In some cases, a subject genome targeting composition includes a type V CRISPR/Cas endonuclease (e.g., Cpf1, C2c1, C2c3). In some cases, a Type V CRISPR/Cas endonuclease is a Cpf1 protein. In some cases, a subject genome targeting composition includes a type VI CRISPR/Cas endonuclease (e.g., Cas13a).

[0133] Like type II CRISPR/Cas endonucleases, type V and VI CRISPR/Cas endonucleases form a complex with a corresponding guide RNA. The guide RNA provides target specificity to an endonuclease-guide RNA RNP complex by having a nucleotide sequence (a guide sequence) that is complementary to a sequence (the target site) of a target nucleic acid (as described elsewhere herein). The endonuclease of the complex provides the site-specific activity. In other words, the endonuclease is guided to a target site (e.g., stabilized at a target site) within a target nucleic acid sequence (e.g. a chromosomal sequence or an extrachromosomal sequence, e.g., an episomal sequence, a minicircle sequence, a mitochondrial sequence, a chloroplast sequence, etc.) by virtue of its association with the protein-binding segment of the guide RNA.

[0134] Examples and guidance related to type V and type VI CRISPR/Cas proteins (e.g., Cpf1, C2c1, C2c2, and C2c3 guide RNAs) can be found in the art, for example, see Zetsche et al., Cell. 2015 Oct. 22; 163(3):759-71; Makarova et al., Nat Rev Microbiol. 2015 November; 13(11):722-36; Shmakov et al., Mol Cell. 2015 Nov. 5; 60(3):385-97; and Shmakov et al. (2017) Nature Reviews Microbiology 15:169.

[0135] In some cases, the Type V or type VI CRISPR/Cas endonuclease (e.g., Cpf1, C2c1, C2c2, C2c3) is enzymatically active, e.g., the Type V or type VI CRISPR/Cas polypeptide, when bound to a guide RNA, cleaves a target nucleic acid. In some cases, the Type V or type VI CRISPR/Cas endonuclease (e.g., Cpf1, C2c1, C2c2, C2c3) exhibits reduced enzymatic activity relative to a corresponding wild-type a Type V or type VI CRISPR/Cas endonuclease (e.g., Cpf1, C2c1, C2c2, C2c3), and retains DNA binding activity.

[0136] In some cases a type V CRISPR/Cas endonuclease is a Cpf1 protein. In some cases, a Cpf1 protein comprises an amino acid sequence having at least 30%, at least 35%, at least 40%, at least 45%, at least 50%, at least 55%, at least 60%, at least 65%, at least 70%, at least 75%, at least 80%, at least 85%, at least 90%, at least 95%, at least 90%, or 100%, amino acid sequence identity to the Cpf1 amino acid sequence set forth in any of SEQ ID NOs: 818-822. In some cases, a Cpf1 protein comprises an amino acid sequence having at least 30%, at least 35%, at least 40%, at least 45%, at least 50%, at least 55%, at least 60%, at least 65%, at least 70%, at least 75%, at least 80%, at least 85%, at least 90%, at least 95%, at least 90%, or 100%, amino acid sequence identity to a contiguous stretch of from 100 amino acids to 200 amino acids (aa), from 200 aa to 400 aa, from 400 aa to 600 aa, from 600 aa to 800 aa, from 800 aa to 1000 aa, from 1000 aa to 1100 aa, from 1100 aa to 1200 aa, or from 1200 aa to 1300 aa, of the Cpf1 amino acid sequence set forth in any of SEQ ID NOs:818-822.

[0137] In some cases, a Cpf1 protein comprises an amino acid sequence having at least 30%, at least 35%, at least 40%, at least 45%, at least 50%, at least 55%, at least 60%, at least 65%, at least 70%, at least 75%, at least 80%, at least 85%, at least 90%, at least 95%, at least 90%, or 100%, amino acid sequence identity to the RuvCI domain of the Cpf1 amino acid sequence set forth in any of SEQ ID NOs: 818-822. In some cases, a Cpf1 protein comprises an amino acid sequence having at least 30%, at least 35%, at least 40%, at least 45%, at least 50%, at least 55%, at least 60%, at least 65%, at least 70%, at least 75%, at least 80%, at least 85%, at least 90%, at least 95%, at least 90%, or 100%, amino acid sequence identity to the RuvCII domain of the Cpf1 amino acid sequence set forth in any of SEQ ID NOs: 818-822. In some cases, a Cpf1 protein comprises an amino acid sequence having at least 30%, at least 35%, at least 40%, at least 45%, at least 50%, at least 55%, at least 60%, at least 65%, at least 70%, at least 75%, at least 80%, at least 85%, at least 90%, at least 95%, at least 90%, or 100%, amino acid sequence identity to the RuvCIII domain of the Cpf1 amino acid sequence set forth in any of SEQ ID NOs: 818-822. In some cases, a Cpf1 protein comprises an amino acid sequence having at least 30%, at least 35%, at least 40%, at least 45%, at least 50%, at least 55%, at least 60%, at least 65%, at least 70%, at least 75%, at least 80%, at least 85%, at least 90%, at least 95%, at least 90%, or 100%, amino acid sequence identity to the RuvCI, RuvCII, and RuvCIII domains of the Cpf1 amino acid sequence set forth in any of SEQ ID NOs: 818-822.

[0138] In some cases, the Cpf1 protein exhibits reduced enzymatic activity relative to a wild-type Cpf1 protein (e.g., relative to a Cpf1 protein comprising the amino acid sequence set forth in any of SEQ ID NOs: 818-822), and retains DNA binding activity. In some cases, a Cpf1 protein comprises an amino acid sequence having at least 30%, at least 35%, at least 40%, at least 45%, at least 50%, at least 55%, at least 60%, at least 65%, at least 70%, at least 75%, at least 80%, at least 85%, at least 90%, at least 95%, at least 90%, or 100%, amino acid sequence identity to the Cpf1 amino acid sequence set forth in any of SEQ ID NOs: 818-822; and comprises an amino acid substitution (e.g., a D→A substitution) at an amino acid residue corresponding to amino acid 917 of the Cpf1 amino acid sequence set forth in SEQ ID NO: 818. In some cases, a Cpf1 protein comprises an amino acid sequence having at least 30%, at least 35%, at least 40%, at least 45%, at least 50%, at least 55%, at least 60%, at least 65%, at least 70%, at least 75%, at least 80%, at least 85%, at least 90%, at least 95%, at least 90%, or 100%, amino acid sequence identity to the Cpf1 amino acid sequence set forth in any of SEQ ID NOs: 818-822; and comprises an amino acid substitution (e.g., an E→A substitution) at an amino acid residue corresponding to amino acid 1006 of the Cpf1 amino acid sequence set forth in SEQ ID NO: 818. In some cases, a Cpf1 protein comprises an amino acid sequence having at least 30%, at least 35%, at least 40%, at least 45%, at least 50%, at least 55%, at least 60%, at least 65%, at least 70%, at least 75%, at least 80%, at least 85%, at least 90%, at least 95%, at least 90%, or 100%, amino acid sequence identity to the Cpf1 amino acid sequence set forth in any of SEQ ID NOs: 818-822; and comprises an amino acid substitution (e.g., a D→A substitution) at an amino acid residue corresponding to amino acid 1255 of the Cpf1 amino acid sequence set forth in SEQ ID NO: 818.

[0139] In some cases, a suitable Cpf1 protein comprises an amino acid sequence having at least 30%, at least 35%, at least 40%, at least 45%, at least 50%, at least 55%, at least 60%, at least 65%, at least 70%, at least 75%, at least 80%, at least 85%, at least 90%, at least 95%, at least 90%, or 100%, amino acid sequence identity to the Cpf1 amino acid sequence set forth in any of SEQ ID NOs: 818-822.

[0140] In some cases a type V CRISPR/Cas endonuclease is a C2c1 protein (examples include those set forth as SEQ ID NOs: 823-830). In some cases, a C2c1 protein comprises an amino acid sequence having at least 30%, at least 35%, at least 40%, at least 45%, at least 50%, at least 55%, at least 60%, at least 65%, at least 70%, at least 75%, at least 80%, at least 85%, at least 90%, at least 95%, at least 90%, or 100%, amino acid sequence identity to the C2c1 amino acid sequence set forth in any of SEQ ID NOs: 823-830. In some cases, a C2c1 protein comprises an amino acid sequence having at least 30%, at least 35%, at least 40%, at least 45%, at least 50%, at least 55%, at least 60%, at least 65%, at least 70%, at least 75%, at least 80%, at least 85%, at least 90%, at least 95%, at least 90%, or 100%, amino acid sequence identity to a contiguous stretch of from 100 amino acids to 200 amino acids (aa), from 200 aa to 400 aa, from 400 aa to 600 aa, from 600 aa to 800 aa, from 800 aa to 1000 aa, from 1000 aa to 1100 aa, from 1100 aa to 1200 aa, or from 1200 aa to 1300 aa, of the C2c1 amino acid sequence set forth in any of SEQ ID NOs: 823-830.

[0141] In some cases, a C2c1 protein comprises an amino acid sequence having at least 30%, at least 35%, at least 40%, at least 45%, at least 50%, at least 55%, at least 60%, at least 65%, at least 70%, at least 75%, at least 80%, at least 85%, at least 90%, at least 95%, at least 90%, or 100%, amino acid sequence identity to the RuvCI domain of the C2c1 amino acid sequences set forth in any of SEQ ID NOs: 823-830). In some cases, a C2c1 protein comprises an amino acid sequence having at least 30%, at least 35%, at least 40%, at least 45%, at least 50%, at least 55%, at least 60%, at least 65%, at least 70%, at least 75%, at least 80%, at least 85%, at least 90%, at least 95%, at least 90%, or 100%, amino acid sequence identity to the RuvCII domain of the C2c1 amino acid sequence set forth in any of SEQ ID NOs: 823-830. In some cases, a C2c1 protein comprises an amino acid sequence having at least 30%, at least 35%, at least 40%, at least 45%, at least 50%, at least 55%, at least 60%, at least 65%, at least 70%, at least 75%, at least 80%, at least 85%, at least 90%, at least 95%, at least 90%, or 100%, amino acid sequence identity to the RuvCIII domain of the C2c1 amino acid sequence set forth in any of SEQ ID NOs: 823-830. In some cases, a C2c1 protein comprises an amino acid sequence having at least 30%, at least 35%, at least 40%, at least 45%, at least 50%, at least 55%, at least 60%, at least 65%, at least 70%, at least 75%, at least 80%, at least 85%, at least 90%, at least 95%, at least 90%, or 100%, amino acid sequence identity to the RuvCI, RuvCII, and RuvCIII domains of the C2c1 amino acid sequence set forth in any of SEQ ID NOs: 823-830.

[0142] In some cases, the C2c1 protein exhibits reduced enzymatic activity relative to a wild-type C2c1 protein (e.g., relative to a C2c1 protein comprising the amino acid sequence set forth in any of SEQ ID NOs: 823-830), and retains DNA binding activity. In some cases, a suitable C2c1 protein comprises an amino acid sequence having at least 30%, at least 35%, at least 40%, at least 45%, at least 50%, at least 55%, at least 60%, at least 65%, at least 70%, at least 75%, at least 80%, at least 85%, at least 90%, at least 95%, at least 90%, or 100%, amino acid sequence identity to the C2c1 amino acid sequence set forth in any of SEQ ID NOs: 823-830.

[0143] In some cases a type V CRISPR/Cas endonuclease is a C2c3 protein (examples include those set forth as SEQ ID NOs: 831-834). In some cases, a C2c3 protein comprises an amino acid sequence having at least 30%, at least 35%, at least 40%, at least 45%, at least 50%, at least 55%, at least 60%, at least 65%, at least 70%, at least 75%, at least 80%, at least 85%, at least 90%, at least 95%, at least 90%, or 100%, amino acid sequence identity to the C2c3 amino acid sequence set forth in any of SEQ ID NOs: 831-834. In some cases, a C2c3 protein comprises an amino acid sequence having at least 30%, at least 35%, at least 40%, at least 45%, at least 50%, at least 55%, at least 60%, at least 65%, at least 70%, at least 75%, at least 80%, at least 85%, at least 90%, at least 95%, at least 90%, or 100%, amino acid sequence identity to a contiguous stretch of from 100 amino acids to 200 amino acids (aa), from 200 aa to 400 aa, from 400 aa to 600 aa, from 600 aa to 800 aa, from 800 aa to 1000 aa, from 1000 aa to 1100 aa, from 1100 aa to 1200 aa, or from 1200 aa to 1300 aa, of the C2c3 amino acid sequence set forth in any of SEQ ID NOs: 831-834.

[0144] In some cases, a C2c3 protein comprises an amino acid sequence having at least 30%, at least 35%, at least 40%, at least 45%, at least 50%, at least 55%, at least 60%, at least 65%, at least 70%, at least 75%, at least 80%, at least 85%, at least 90%, at least 95%, at least 90%, or 100%, amino acid sequence identity to the RuvCI domain of the C2c3 amino acid sequence set forth in any of SEQ ID NOs: 831-834. In some cases, a C2c3 protein comprises an amino acid sequence having at least 30%, at least 35%, at least 40%, at least 45%, at least 50%, at least 55%, at least 60%, at least 65%, at least 70%, at least 75%, at least 80%, at least 85%, at least 90%, at least 95%, at least 90%, or 100%, amino acid sequence identity to the RuvCII domain of the C2c3 amino acid sequence set forth in any of SEQ ID NOs: 831-834. In some cases, a C2c3 protein comprises an amino acid sequence having at least 30%, at least 35%, at least 40%, at least 45%, at least 50%, at least 55%, at least 60%, at least 65%, at least 70%, at least 75%, at least 80%, at least 85%, at least 90%, at least 95%, at least 90%, or 100%, amino acid sequence identity to the RuvCIII domain of the C2c3 amino acid sequence set forth in any of SEQ ID NOs: 831-834. In some cases, a C2c3 protein comprises an amino acid sequence having at least 30%, at least 35%, at least 40%, at least 45%, at least 50%, at least 55%, at least 60%, at least 65%, at least 70%, at least 75%, at least 80%, at least 85%, at least 90%, at least 95%, at least 90%, or 100%, amino acid sequence identity to the RuvCI, RuvCII, and RuvCIII domains of the C2c3 amino acid sequence set forth in any of SEQ ID NOs: 831-834.

[0145] In some cases, the C2c3 protein exhibits reduced enzymatic activity relative to a wild-type C2c3 protein (e.g., relative to a C2c3 protein comprising the amino acid sequence set forth in any of SEQ ID NOs: 831-834), and retains DNA binding activity. In some cases, a suitable C2c3 protein comprises an amino acid sequence having at least 30%, at least 35%, at least 40%, at least 45%, at least 50%, at least 55%, at least 60%, at least 65%, at least 70%, at least 75%, at least 80%, at least 85%, at least 90%, at least 95%, at least 90%, or 100%, amino acid sequence identity to the C2c3 amino acid sequence set forth in any of SEQ ID NOs: 831-834.

[0146] In some cases a type VI CRISPR/Cas endonuclease is a C2c2 protein (examples include those set forth as SEQ ID NOs: 835-846). In some cases, a C2c2 protein comprises an amino acid sequence having at least 30%, at least 35%, at least 40%, at least 45%, at least 50%, at least 55%, at least 60%, at least 65%, at least 70%, at least 75%, at least 80%, at least 85%, at least 90%, at least 95%, at least 90%, or 100%, amino acid sequence identity to the C2c2 amino acid sequence set forth in any of SEQ ID NOs: 835-846. In some cases, a C2c2 protein comprises an amino acid sequence having at least 30%, at least 35%, at least 40%, at least 45%, at least 50%, at least 55%, at least 60%, at least 65%, at least 70%, at least 75%, at least 80%, at least 85%, at least 90%, at least 95%, at least 90%, or 100%, amino acid sequence identity to a contiguous stretch of from 100 amino acids to 200 amino acids (aa), from 200 aa to 400 aa, from 400 aa to 600 aa, from 600 aa to 800 aa, from 800 aa to 1000 aa, from 1000 aa to 1100 aa, from 1100 aa to 1200 aa, or from 1200 aa to 1300 aa, of the C2c2 amino acid sequence set forth in any of SEQ ID NOs: 835-846.

[0147] In some cases, a C2c2 protein comprises an amino acid sequence having at least 30%, at least 35%, at least 40%, at least 45%, at least 50%, at least 55%, at least 60%, at least 65%, at least 70%, at least 75%, at least 80%, at least 85%, at least 90%, at least 95%, at least 90%, or 100%, amino acid sequence identity to the RuvCI domain of the C2c2 amino acid sequence set forth in any of SEQ ID NOs: 835-846. In some cases, a C2c2 protein comprises an amino acid sequence having at least 30%, at least 35%, at least 40%, at least 45%, at least 50%, at least 55%, at least 60%, at least 65%, at least 70%, at least 75%, at least 80%, at least 85%, at least 90%, at least 95%, at least 90%, or 100%, amino acid sequence identity to the RuvCII domain of the C2c2 amino acid sequence set forth in any of SEQ ID NOs: 835-846. In some cases, a C2c2 protein comprises an amino acid sequence having at least 30%, at least 35%, at least 40%, at least 45%, at least 50%, at least 55%, at least 60%, at least 65%, at least 70%, at least 75%, at least 80%, at least 85%, at least 90%, at least 95%, at least 90%, or 100%, amino acid sequence identity to the RuvCIII domain of the C2c2 amino acid sequence set forth in any of SEQ ID NOs: 835-846. In some cases, a C2c2 protein comprises an amino acid sequence having at least 30%, at least 35%, at least 40%, at least 45%, at least 50%, at least 55%, at least 60%, at least 65%, at least 70%, at least 75%, at least 80%, at least 85%, at least 90%, at least 95%, at least 90%, or 100%, amino acid sequence identity to the RuvCI, RuvCII, and RuvCIII domains of the C2c2 amino acid sequence set forth in any of SEQ ID NOs: 835-846.

[0148] In some cases, the C2c2 protein exhibits reduced enzymatic activity relative to a wild-type C2c2 protein (e.g., relative to a C2c2 protein comprising the amino acid sequence set forth in any of SEQ ID NOs: 835-846), and retains DNA binding activity. In some cases, a suitable C2c2 protein comprises an amino acid sequence having at least 30%, at least 35%, at least 40%, at least 45%, at least 50%, at least 55%, at least 60%, at least 65%, at least 70%, at least 75%, at least 80%, at least 85%, at least 90%, at least 95%, at least 90%, or 100%, amino acid sequence identity to the C2c2 amino acid sequence set forth in any of SEQ ID NOs: 835-846.

[0149] Examples and guidance related to type V or type VI CRISPR/Cas endonucleases (including domain structure) and guide RNAs (as well as information regarding requirements related to protospacer adjacent motif (PAM) sequences present in targeted nucleic acids) can be found in the art, for example, see Zetsche et al., Cell. 2015 Oct. 22; 163(3):759-71; Makarova et al., Nat Rev Microbiol. 2015 November; 13(11):722-36; Shmakov et al., Mol Cell. 2015 Nov. 5; 60(3):385-97; and Shmakov et al., Nat Rev Microbiol. 2017 March; 15(3):169-182; and U.S. patents and patent applications: U.S. Pat. No. 9,580,701; 20170073695, 20170058272, 20160362668, 20160362667, 20160298078, 20160289637, 20160215300, 20160208243, and 20160208241, each of which is hereby incorporated by reference in its entirety.

### CasX and CasY Proteins

[0150] Suitable RNA-guided endonucleases include CasX and CasY proteins. See, e.g., Burstein et al. (2017) Nature 542:237.

### Cas9 Guide RNA

[0151] A nucleic acid molecule that binds to a Cas9 protein and targets the complex to a specific location within a target nucleic acid is referred to herein as a “Cas9 guide RNA.”

[0152] A Cas9 guide RNA (can be said to include two segments, a first segment (referred to herein as a “targeting segment”); and a second segment (referred to herein as a “protein-binding segment”). By “segment” it is meant a segment/section/region of a molecule, e.g., a contiguous stretch of nucleotides in a nucleic acid molecule. A segment can also mean a region/section of a complex such that a segment may comprise regions of more than one molecule.

[0153] The first segment (targeting segment) of a Cas9 guide RNA includes a nucleotide sequence (a guide sequence) that is complementary to (and therefore hybridizes with) a specific sequence (a target site) within a target nucleic acid (e.g., a target ssRNA, a target ssDNA, the complementary strand of a double stranded target DNA, etc.). The protein-binding segment (or “protein-binding sequence”) interacts with (binds to) a Cas9 polypeptide. The protein-binding segment of a subject Cas9 guide RNA includes two complementary stretches of nucleotides that hybridize to one another to form a double stranded RNA duplex (dsRNA duplex). Site-specific binding and/or cleavage of a target nucleic acid (e.g., genomic DNA) can occur at locations (e.g., target sequence of a target locus) determined by base-pairing complementarity between the Cas9 guide RNA (the guide sequence of the Cas9 guide RNA) and the target nucleic acid.

[0154] A Cas9 guide RNA and a Cas9 protein form a complex (e.g., bind via non-covalent interactions). The Cas9 guide RNA provides target specificity to the complex by including a targeting segment, which includes a guide sequence (a nucleotide sequence that is complementary to a sequence of a target nucleic acid). The Cas9 protein of the complex provides the site-specific activity (e.g., cleavage activity or an activity provided by the Cas9 protein when the Cas9 protein is a Cas9 fusion polypeptide, i.e., has a fusion partner). In other words, the Cas9 protein is guided to a target nucleic acid sequence (e.g. a target sequence in a chromosomal nucleic acid, e.g., a chromosome; a target sequence in an extrachromosomal nucleic acid, e.g. an episomal nucleic acid, a minicircle, an ssRNA, an ssDNA, etc.; a target sequence in a mitochondrial nucleic acid; a target sequence in a chloroplast nucleic acid; a target sequence in a plasmid; a target sequence in a viral nucleic acid; etc.) by virtue of its association with the Cas9 guide RNA.

[0155] The “guide sequence” also referred to as the “targeting sequence” of a Cas9 guide RNA can be modified so that the Cas9 guide RNA can target a Cas9 protein to any desired sequence of any desired target nucleic acid, with the exception that the protospacer adjacent motif (PAM) sequence can be taken into account. Thus, for example, a Cas9 guide RNA can have a targeting segment with a sequence (a guide sequence) that has complementarity with (e.g., can hybridize to) a sequence in a nucleic acid in a eukaryotic cell, e.g., a viral nucleic acid, a eukaryotic nucleic acid (e.g., a eukaryotic chromosome, chromosomal sequence, a eukaryotic RNA, etc.), and the like.

[0156] In some embodiments, a Cas9 guide RNA includes two separate nucleic acid molecules: an “activator” and a “targeter” and is referred to herein as a “dual Cas9 guide RNA”, a “double-molecule Cas9 guide RNA”, or a “two-molecule Cas9 guide RNA” a “dual guide RNA”, or a “dgRNA.” In some embodiments, the activator and targeter are covalently linked to one another (e.g., via intervening nucleotides) and the guide RNA is referred to as a “single guide RNA”, a “Cas9 single guide RNA”, a “single-molecule Cas9 guide RNA,” or a “one-molecule Cas9 guide RNA”, or simply “sgRNA.”

[0157] A Cas9 guide RNA comprises a crRNA-like (“CRISPR RNA”/“targeter”/“crRNA”/“crRNA repeat”) molecule and a corresponding tracrRNA-like (“trans-acting CRISPR RNA”/“activator”/“tracrRNA”) molecule. A crRNA-like molecule (targeter) comprises both the targeting segment (single stranded) of the Cas9 guide RNA and a stretch (“duplex-forming segment”) of nucleotides that forms one half of the dsRNA duplex of the protein-binding segment of the Cas9 guide RNA. A corresponding tracrRNA-like molecule (activator/tracrRNA) comprises a stretch of nucleotides (duplex-forming segment) that forms the other half of the dsRNA duplex of the protein-binding segment of the guide nucleic acid. In other words, a stretch of nucleotides of a crRNA-like molecule are complementary to and hybridize with a stretch of nucleotides of a tracrRNA-like molecule to form the dsRNA duplex of the protein-binding domain of the Cas9 guide RNA. As such, each targeter molecule can be said to have a corresponding activator molecule (which has a region that hybridizes with the targeter). The targeter molecule additionally provides the targeting segment. Thus, a targeter and an activator molecule (as a corresponding pair) hybridize to form a Cas9 guide RNA. The exact sequence of a given crRNA or tracrRNA molecule is characteristic of the species in which the RNA molecules are found. A subject dual Cas9 guide RNA can include any corresponding activator and targeter pair.

[0158] The term “activator” or “activator RNA” is used herein to mean a tracrRNA-like molecule (tracrRNA: “trans-acting CRISPR RNA”) of a Cas9 dual guide RNA (and therefore of a Cas9 single guide RNA when the “activator” and the “targeter” are linked together by, e.g., intervening nucleotides). Thus, for example, a Cas9 guide RNA (dgRNA or sgRNA) comprises an activator sequence (e.g., a tracrRNA sequence). A tracr molecule (a tracrRNA) is a naturally existing molecule that hybridizes with a CRISPR RNA molecule (a crRNA) to form a Cas9 dual guide RNA. The term “activator” is used herein to encompass naturally existing tracrRNAs, but also to encompass tracrRNAs with modifications (e.g., truncations, sequence variations, base modifications, backbone modifications, linkage modifications, etc.) where the activator retains at least one function of a tracrRNA (e.g., contributes to the dsRNA duplex to which Cas9 protein binds). In some cases the activator provides one or more stem loops that can interact with Cas9 protein. An activator can be referred to as having a tracr sequence (tracrRNA sequence) and in some cases is a tracrRNA, but the term “activator” is not limited to naturally existing tracrRNAs.

[0159] The term “targeter” or “targeter RNA” is used herein to refer to a crRNA-like molecule (crRNA: “CRISPR RNA”) of a Cas9 dual guide RNA (and therefore of a Cas9 single guide RNA when the “activator” and the “targeter” are linked together, e.g., by intervening nucleotides). Thus, for example, a Cas9 guide RNA (dgRNA or sgRNA) comprises a targeting segment (which includes nucleotides that hybridize with (are complementary to) a target nucleic acid, and a duplex-forming segment (e.g., a duplex forming segment of a crRNA, which can also be referred to as a crRNA repeat). Because the sequence of a targeting segment (the segment that hybridizes with a target sequence of a target nucleic acid) of a targeter is modified by a user to hybridize with a desired target nucleic acid, the sequence of a targeter will often be a non-naturally occurring sequence. However, the duplex-forming segment of a targeter (described in more detail below), which hybridizes with the duplex-forming segment of an activator, can include a naturally existing sequence (e.g., can include the sequence of a duplex-forming segment of a naturally existing crRNA, which can also be referred to as a crRNA repeat). Thus, the term targeter is used herein to distinguish from naturally occurring crRNAs, despite the fact that part of a targeter (e.g., the duplex-forming segment) often includes a naturally occurring sequence from a crRNA. However, the term “targeter” encompasses naturally occurring crRNAs.

[0160] A Cas9 guide RNA can also be said to include 3 parts: (i) a targeting sequence (a nucleotide sequence that hybridizes with a sequence of the target nucleic acid); (ii) an activator sequence (as described above)(in some cases, referred to as a tracr sequence); and (iii) a sequence that hybridizes to at least a portion of the activator sequence to form a double stranded duplex. A targeter has (i) and (iii); while an activator has (ii).

[0161] A Cas9 guide RNA (e.g. a dual guide RNA or a single guide RNA) can be comprised of any corresponding activator and targeter pair. In some cases, the duplex forming segments can be swapped between the activator and the targeter. In other words, in some cases, the targeter includes a sequence of nucleotides from a duplex forming segment of a tracrRNA (which sequence would normally be part of an activator) while the activator includes a sequence of nucleotides from a duplex forming segment of a crRNA (which sequence would normally be part of a targeter).

[0162] As noted above, a targeter comprises both the targeting segment (single stranded) of the Cas9 guide RNA and a stretch (“duplex-forming segment”) of nucleotides that forms one half of the dsRNA duplex of the protein-binding segment of the Cas9 guide RNA. A corresponding tracrRNA-like molecule (activator) comprises a stretch of nucleotides (a duplex-forming segment) that forms the other half of the dsRNA duplex of the protein-binding segment of the Cas9 guide RNA. In other words, a stretch of nucleotides of the targeter is complementary to and hybridizes with a stretch of nucleotides of the activator to form the dsRNA duplex of the protein-binding segment of a Cas9 guide RNA. As such, each targeter can be said to have a corresponding activator (which has a region that hybridizes with the targeter). The targeter molecule additionally provides the targeting segment. Thus, a targeter and an activator (as a corresponding pair) hybridize to form a Cas9 guide RNA. The particular sequence of a given naturally existing crRNA or tracrRNA molecule is characteristic of the species in which the RNA molecules are found. Examples of suitable activator and targeter are well known in the art.

[0163] A Cas9 guide RNA (e.g. a dual guide RNA or a single guide RNA) can be comprised of any corresponding activator and targeter pair. Non-limiting examples of nucleotide sequences that can be included in a Cas9 guide RNA (dgRNA or sgRNA) include sequences set forth in SEQ ID NOs: 847-1095, or complements thereof. For example, in some cases, sequences from SEQ ID NOs: 847-977 (which are from tracrRNAs) or complements thereof, can pair with sequences from SEQ ID NOs: 867-1095 (which are from crRNAs), or complements thereof, to form a dsRNA duplex of a protein binding segment.

### Targeting Segment of a Cas9 Guide RNA

[0164] The first segment of a subject guide nucleic acid includes a guide sequence (i.e., a targeting sequence)(a nucleotide sequence that is complementary to a sequence (a target site) in a target nucleic acid). In other words, the targeting segment of a subject guide nucleic acid can interact with a target nucleic acid (e.g., double stranded DNA (dsDNA)) in a sequence-specific manner via hybridization (i.e., base pairing). As such, the nucleotide sequence of the targeting segment may vary (depending on the target) and can determine the location within the target nucleic acid that the Cas9 guide RNA and the target nucleic acid will interact. The targeting segment of a Cas9 guide RNA can be modified (e.g., by genetic engineering)/designed to hybridize to any desired sequence (target site) within a target nucleic acid (e.g., a eukaryotic target nucleic acid such as genomic DNA).

[0165] The targeting segment can have a length of 7 or more nucleotides (nt) (e.g., 8 or more, 9 or more, 10 or more, 12 or more, 15 or more, 20 or more, 25 or more, 30 or more, or 40 or more nucleotides). In some cases, the targeting segment can have a length of from 7 to 100 nucleotides (nt) (e.g., from 7 to 80 nt, from 7 to 60 nt, from 7 to 40 nt, from 7 to 30 nt, from 7 to 25 nt, from 7 to 22 nt, from 7 to 20 nt, from 7 to 18 nt, from 8 to 80 nt, from 8 to 60 nt, from 8 to 40 nt, from 8 to 30 nt, from 8 to 25 nt, from 8 to 22 nt, from 8 to 20 nt, from 8 to 18 nt, from 10 to 100 nt, from 10 to 80 nt, from 10 to 60 nt, from 10 to 40 nt, from 10 to 30 nt, from 10 to 25 nt, from 10 to 22 nt, from 10 to 20 nt, from 10 to 18 nt, from 12 to 100 nt, from 12 to 80 nt, from 12 to 60 nt, from 12 to 40 nt, from 12 to 30 nt, from 12 to 25 nt, from 12 to 22 nt, from 12 to 20 nt, from 12 to 18 nt, from 14 to 100 nt, from 14 to 80 nt, from 14 to 60 nt, from 14 to 40 nt, from 14 to 30 nt, from 14 to 25 nt, from 14 to 22 nt, from 14 to 20 nt, from 14 to 18 nt, from 16 to 100 nt, from 16 to 80 nt, from 16 to 60 nt, from 16 to 40 nt, from 16 to 30 nt, from 16 to 25 nt, from 16 to 22 nt, from 16 to 20 nt, from 16 to 18 nt, from 18 to 100 nt, from 18 to 80 nt, from 18 to 60 nt, from 18 to 40 nt, from 18 to 30 nt, from 18 to 25 nt, from 18 to 22 nt, or from 18 to 20 nt).

[0166] The nucleotide sequence (the targeting sequence) of the targeting segment that is complementary to a nucleotide sequence (target site) of the target nucleic acid can have a length of 10 nt or more. For example, the targeting sequence of the targeting segment that is complementary to a target site of the target nucleic acid can have a length of 12 nt or more, 15 nt or more, 18 nt or more, 19 nt or more, or 20 nt or more. In some cases, the nucleotide sequence (the targeting sequence) of the targeting segment that is complementary to a nucleotide sequence (target site) of the target nucleic acid has a length of 12 nt or more. In some cases, the nucleotide sequence (the targeting sequence) of the targeting segment that is complementary to a nucleotide sequence (target site) of the target nucleic acid has a length of 18 nt or more.

[0167] For example, the targeting sequence of the targeting segment that is complementary to a target sequence of the target nucleic acid can have a length of from 10 to 100 nucleotides (nt) (e.g., from 10 to 90 nt, from 10 to 75 nt, from 10 to 60 nt, from 10 to 50 nt, from 10 to 35 nt, from 10 to 30 nt, from 10 to 25 nt, from 10 to 22 nt, from 10 to 20 nt, from 12 to 100 nt, from 12 to 90 nt, from 12 to 75 nt, from 12 to 60 nt, from 12 to 50 nt, from 12 to 35 nt, from 12 to 30 nt, from 12 to 25 nt, from 12 to 22 nt, from 12 to 20 nt, from 15 to 100 nt, from 15 to 90 nt, from 15 to 75 nt, from 15 to 60 nt, from 15 to 50 nt, from 15 to 35 nt, from 15 to 30 nt, from 15 to 25 nt, from 15 to 22 nt, from 15 to 20 nt, from 17 to 100 nt, from 17 to 90 nt, from 17 to 75 nt, from 17 to 60 nt, from 17 to 50 nt, from 17 to 35 nt, from 17 to 30 nt, from 17 to 25 nt, from 17 to 22 nt, from 17 to 20 nt, from 18 to 100 nt, from 18 to 90 nt, from 18 to 75 nt, from 18 to 60 nt, from 18 to 50 nt, from 18 to 35 nt, from 18 to 30 nt, from 18 to 25 nt, from 18 to 22 nt, or from 18 to 20 nt). In some cases, the targeting sequence of the targeting segment that is complementary to a target sequence of the target nucleic acid has a length of from 15 nt to 30 nt. In some cases, the targeting sequence of the targeting segment that is complementary to a target sequence of the target nucleic acid has a length of from 15 nt to 25 nt. In some cases, the targeting sequence of the targeting segment that is complementary to a target sequence of the target nucleic acid has a length of from 18 nt to 30 nt. In some cases, the targeting sequence of the targeting segment that is complementary to a target sequence of the target nucleic acid has a length of from 18 nt to 25 nt. In some cases, the targeting sequence of the targeting segment that is complementary to a target sequence of the target nucleic acid has a length of from 18 nt to 22 nt. In some cases, the targeting sequence of the targeting segment that is complementary to a target site of the target nucleic acid is 20 nucleotides in length. In some cases, the targeting sequence of the targeting segment that is complementary to a target site of the target nucleic acid is 19 nucleotides in length.

[0168] The percent complementarity between the targeting sequence (guide sequence) of the targeting segment and the target site of the target nucleic acid can be 60% or more (e.g., 65% or more, 70% or more, 75% or more, 80% or more, 85% or more, 90% or more, 95% or more, 97% or more, 98% or more, 99% or more, or 100%). In some cases, the percent complementarity between the targeting sequence of the targeting segment and the target site of the target nucleic acid is 100% over the seven contiguous 5′-most nucleotides of the target site of the target nucleic acid. In some cases, the percent complementarity between the targeting sequence of the targeting segment and the target site of the target nucleic acid is 60% or more over about 20 contiguous nucleotides. In some cases, the percent complementarity between the targeting sequence of the targeting segment and the target site of the target nucleic acid is 100% over the fourteen contiguous 5′-most nucleotides of the target site of the target nucleic acid and as low as 0% or more over the remainder. In such a case, the targeting sequence can be considered to be 14 nucleotides in length. In some cases, the percent complementarity between the targeting sequence of the targeting segment and the target site of the target nucleic acid is 100% over the seven contiguous 5′-most nucleotides of the target site of the target nucleic acid and as low as 0% or more over the remainder. In such a case, the targeting sequence can be considered to be 20 nucleotides in length.

[0169] In some cases, the percent complementarity between the targeting sequence of the targeting segment and the target site of the target nucleic acid is 100% over the 7 contiguous 5′-most nucleotides of the target site of the target nucleic acid (which can be complementary to the 3′-most nucleotides of the targeting sequence of the Cas9 guide RNA). In some cases, the percent complementarity between the targeting sequence of the targeting segment and the target site of the target nucleic acid is 100% over the 8 contiguous 5′-most nucleotides of the target site of the target nucleic acid (which can be complementary to the 3′-most nucleotides of the targeting sequence of the Cas9 guide RNA). In some cases, the percent complementarity between the targeting sequence of the targeting segment and the target site of the target nucleic acid is 100% over the 9 contiguous 5′-most nucleotides of the target site of the target nucleic acid (which can be complementary to the 3′-most nucleotides of the targeting sequence of the Cas9 guide RNA). In some cases, the percent complementarity between the targeting sequence of the targeting segment and the target site of the target nucleic acid is 100% over the 10 contiguous 5′-most nucleotides of the target site of the target nucleic acid (which can be complementary to the 3′-most nucleotides of the targeting sequence of the Cas9 guide RNA). In some cases, the percent complementarity between the targeting sequence of the targeting segment and the target site of the target nucleic acid is 100% over the 17 contiguous 5′-most nucleotides of the target site of the target nucleic acid (which can be complementary to the 3′-most nucleotides of the targeting sequence of the Cas9 guide RNA). In some cases, the percent complementarity between the targeting sequence of the targeting segment and the target site of the target nucleic acid is 100% over the 18 contiguous 5′-most nucleotides of the target site of the target nucleic acid (which can be complementary to the 3′-most nucleotides of the targeting sequence of the Cas9 guide RNA). In some cases, the percent complementarity between the targeting sequence of the targeting segment and the target site of the target nucleic acid is 60% or more (e.g., e.g., 65% or more, 70% or more, 75% or more, 80% or more, 85% or more, 90% or more, 95% or more, 97% or more, 98% or more, 99% or more, or 100%) over about 20 contiguous nucleotides.

[0170] In some cases, the percent complementarity between the targeting sequence of the targeting segment and the target site of the target nucleic acid is 100% over the 7 contiguous 5′-most nucleotides of the target site of the target nucleic acid and as low as 0% or more over the remainder. In such a case, the targeting sequence can be considered to be 7 nucleotides in length. In some cases, the percent complementarity between the targeting sequence of the targeting segment and the target site of the target nucleic acid is 100% over the 8 contiguous 5′-most nucleotides of the target site of the target nucleic acid and as low as 0% or more over the remainder. In such a case, the targeting sequence can be considered to be 8 nucleotides in length. In some cases, the percent complementarity between the targeting sequence of the targeting segment and the target site of the target nucleic acid is 100% over the 9 contiguous 5′-most nucleotides of the target site of the target nucleic acid and as low as 0% or more over the remainder. In such a case, the targeting sequence can be considered to be 9 nucleotides in length. In some cases, the percent complementarity between the targeting sequence of the targeting segment and the target site of the target nucleic acid is 100% over the 10 contiguous 5′-most nucleotides of the target site of the target nucleic acid and as low as 0% or more over the remainder. In such a case, the targeting sequence can be considered to be 10 nucleotides in length. In some cases, the percent complementarity between the targeting sequence of the targeting segment and the target site of the target nucleic acid is 100% over the 11 contiguous 5′-most nucleotides of the target site of the target nucleic acid and as low as 0% or more over the remainder. In such a case, the targeting sequence can be considered to be 11 nucleotides in length. In some cases, the percent complementarity between the targeting sequence of the targeting segment and the target site of the target nucleic acid is 100% over the 12 contiguous 5′-most nucleotides of the target site of the target nucleic acid and as low as 0% or more over the remainder. In such a case, the targeting sequence can be considered to be 12 nucleotides in length. In some cases, the percent complementarity between the targeting sequence of the targeting segment and the target site of the target nucleic acid is 100% over the 13 contiguous 5′-most nucleotides of the target site of the target nucleic acid and as low as 0% or more over the remainder. In such a case, the targeting sequence can be considered to be 13 nucleotides in length. In some cases, the percent complementarity between the targeting sequence of the targeting segment and the target site of the target nucleic acid is 100% over the 14 contiguous 5′-most nucleotides of the target site of the target nucleic acid and as low as 0% or more over the remainder. In such a case, the targeting sequence can be considered to be 14 nucleotides in length. In some cases, the percent complementarity between the targeting sequence of the targeting segment and the target site of the target nucleic acid is 100% over the 17 contiguous 5′-most nucleotides of the target site of the target nucleic acid and as low as 0% or more over the remainder. In such a case, the targeting sequence can be considered to be 17 nucleotides in length. In some cases, the percent complementarity between the targeting sequence of the targeting segment and the target site of the target nucleic acid is 100% over the 18 contiguous 5′-most nucleotides of the target site of the target nucleic acid and as low as 0% or more over the remainder. In such a case, the targeting sequence can be considered to be 18 nucleotides in length.

[0171] Examples of various Cas9 proteins and Cas9 guide RNAs (as well as information regarding requirements related to protospacer adjacent motif (PAM) sequences present in targeted nucleic acids) can be found in the art, for example, see Jinek et al., Science. 2012 Aug. 17; 337(6096):816-21; Chylinski et al., RNA Biol. 2013 May; 10(5):726-37; Ma et al., Biomed Res Int. 2013; 2013:270805; Hou et al., Proc Natl Acad Sci USA. 2013 Sep. 24; 110(39):15644-9; Jinek et al., Elife. 2013; 2:e00471; Pattanayak et al., Nat Biotechnol. 2013 September; 31(9):839-43; Qi et al., Cell. 2013 Feb. 28; 152(5):1173-83; Wang et al., Cell. 2013 May 9; 153(4):910-8; Auer et al., Genome Res. 2013 Oct. 31; Chen et al., Nucleic Acids Res. 2013 Nov. 1; 41(20):e19; Cheng et al., Cell Res. 2013 October; 23(10):1163-71; Cho et al., Genetics. 2013 November; 195(3):1177-80; DiCarlo et al., Nucleic Acids Res. 2013 April; 41(7):4336-43; Dickinson et al., Nat Methods. 2013 October; 10(10):1028-34; Ebina et al., Sci Rep. 2013; 3:2510; Fujii et al., Nucleic Acids Res. 2013 Nov. 1; 41(20):e187; Hu et al., Cell Res. 2013 November; 23(11):1322-5; Jiang et al., Nucleic Acids Res. 2013 Nov. 1; 41(20):e188; Larson et al., Nat Protoc. 2013 November; 8(11):2180-96; Mali et al., Nat Methods. 2013 October; 10(10):957-63; Nakayama et al., Genesis. 2013 December; 51(12):835-43; Ran et al., Nat Protoc. 2013 November; 8(11):2281-308; Ran et al., Cell. 2013 Sep. 12; 154(6):1380-9; Upadhyay et al., G3 (Bethesda). 2013 Dec. 9; 3(12):2233-8; Walsh et al., Proc Natl Acad Sci USA. 2013 Sep. 24; 110(39):15514-5; Xie et al., Mol Plant. 2013 Oct. 9; Yang et al., Cell. 2013 Sep. 12; 154(6):1370-9; Briner et al., Mol Cell. 2014 Oct. 23; 56(2):333-9; and U.S. patents and patent applications: U.S. Pat. Nos. 8,906,616; 8,895,308; 8,889,418; 8,889,356; 8,871,445; 8,865,406; 8,795,965; 8,771,945; 8,697,359; 20140068797; 20140170753; 20140179006; 20140179770; 20140186843; 20140186919; 20140186958; 20140189896; 20140227787; 20140234972; 20140242664; 20140242699; 20140242700; 20140242702; 20140248702; 20140256046; 20140273037; 20140273226; 20140273230; 20140273231; 20140273232; 20140273233; 20140273234; 20140273235; 20140287938; 20140295556; 20140295557; 20140298547; 20140304853; 20140309487; 20140310828; 20140310830; 20140315985; 20140335063; 20140335620; 20140342456; 20140342457; 20140342458; 20140349400; 20140349405; 20140356867; 20140356956; 20140356958; 20140356959; 20140357523; 20140357530; 20140364333; and 20140377868; all of which are hereby incorporated by reference in their entirety.

### Guide RNAs Corresponding to Type V and Type VI CRISPR/Cas Endonucleases (e.g., Cpf1 Guide RNA)

[0172] A guide RNA that binds to a type V or type VI CRISPR/Cas protein (e.g., Cpf1, C2c1, C2c2, C2c3), and targets the complex to a specific location within a target nucleic acid is referred to herein generally as a “type V or type VI CRISPR/Cas guide RNA”. An example of a more specific term is a “Cpf1 guide RNA.”

[0173] A type V or type VI CRISPR/Cas guide RNA (e.g., cpf1 guide RNA) can have a total length of from 30 nucleotides (nt) to 200 nt, e.g., from 30 nt to 180 nt, from 30 nt to 160 nt, from 30 nt to 150 nt, from 30 nt to 125 nt, from 30 nt to 100 nt, from 30 nt to 90 nt, from 30 nt to 80 nt, from 30 nt to 70 nt, from 30 nt to 60 nt, from 30 nt to 50 nt, from 50 nt to 200 nt, from 50 nt to 180 nt, from 50 nt to 160 nt, from 50 nt to 150 nt, from 50 nt to 125 nt, from 50 nt to 100 nt, from 50 nt to 90 nt, from 50 nt to 80 nt, from 50 nt to 70 nt, from 50 nt to 60 nt, from 70 nt to 200 nt, from 70 nt to 180 nt, from 70 nt to 160 nt, from 70 nt to 150 nt, from 70 nt to 125 nt, from 70 nt to 100 nt, from 70 nt to 90 nt, or from 70 nt to 80 nt). In some cases, a type V or type VI CRISPR/Cas guide RNA (e.g., cpf1 guide RNA) has a total length of at least 30 nt (e.g., at least 40 nt, at least 50 nt, at least 60 nt, at least 70 nt, at least 80 nt, at least 90 nt, at least 100 nt, or at least 120 nt).

[0174] In some cases, a Cpf1 guide RNA has a total length of 35 nt, 36 nt, 37 nt, 38 nt, 39 nt, 40 nt, 41 nt, 42 nt, 43 nt, 44 nt, 45 nt, 46 nt, 47 nt, 48 nt, 49 nt, or 50 nt.

[0175] Like a Cas9 guide RNA, a type V or type VI CRISPR/Cas guide RNA (e.g., cpf1 guide RNA) can include a target nucleic acid-binding segment and a duplex-forming region (e.g., in some cases formed from two duplex-forming segments, i.e., two stretches of nucleotides that hybridize to one another to form a duplex).

[0176] The target nucleic acid-binding segment of a type V or type VI CRISPR/Cas guide RNA (e.g., cpf1 guide RNA) can have a length of from 15 nt to 30 nt, e.g., 15 nt, 16 nt, 17 nt, 18 nt, 19 nt, 20 nt, 21 nt, 22 nt, 23 nt, 24 nt, 25 nt, 26 nt, 27 nt, 28 nt, 29 nt, or 30 nt. In some cases, the target nucleic acid-binding segment has a length of 23 nt. In some cases, the target nucleic acid-binding segment has a length of 24 nt. In some cases, the target nucleic acid-binding segment has a length of 25 nt.

[0177] The guide sequence of a type V or type VI CRISPR/Cas guide RNA (e.g., cpf1 guide RNA) can have a length of from 15 nt to 30 nt (e.g., 15 to 25 nt, 15 to 24 nt, 15 to 23 nt, 15 to 22 nt, 15 to 21 nt, 15 to 20 nt, 15 to 19 nt, 15 to 18 nt, 17 to 30 nt, 17 to 25 nt, 17 to 24 nt, 17 to 23 nt, 17 to 22 nt, 17 to 21 nt, 17 to 20 nt, 17 to 19 nt, 17 to 18 nt, 18 to 30 nt, 18 to 25 nt, 18 to 24 nt, 18 to 23 nt, 18 to 22 nt, 18 to 21 nt, 18 to 20 nt, 18 to 19 nt, 19 to 30 nt, 19 to 25 nt, 19 to 24 nt, 19 to 23 nt, 19 to 22 nt, 19 to 21 nt, 19 to 20 nt, 20 to 30 nt, 20 to 25 nt, 20 to 24 nt, 20 to 23 nt, 20 to 22 nt, 20 to 21 nt, 15 nt, 16 nt, 17 nt, 18 nt, 19 nt, 20 nt, 21 nt, 22 nt, 23 nt, 24 nt, 25 nt, 26 nt, 27 nt, 28 nt, 29 nt, or 30 nt). In some cases, the guide sequence has a length of 17 nt. In some cases, the guide sequence has a length of 18 nt. In some cases, the guide sequence has a length of 19 nt. In some cases, the guide sequence has a length of 20 nt. In some cases, the guide sequence has a length of 21 nt. In some cases, the guide sequence has a length of 22 nt. In some cases, the guide sequence has a length of 23 nt. In some cases, the guide sequence has a length of 24 nt.

[0178] The guide sequence of a type V or type VI CRISPR/Cas guide RNA (e.g., cpf1 guide RNA) can have 100% complementarity with a corresponding length of target nucleic acid sequence. The guide sequence can have less than 100% complementarity with a corresponding length of target nucleic acid sequence. For example, the guide sequence of a type V or type VI CRISPR/Cas guide RNA (e.g., cpf1 guide RNA) can have 1, 2, 3, 4, or 5 nucleotides that are not complementary to the target nucleic acid sequence. For example, in some cases, where a guide sequence has a length of 25 nucleotides, and the target nucleic acid sequence has a length of 25 nucleotides, in some cases, the target nucleic acid-binding segment has 100% complementarity to the target nucleic acid sequence. As another example, in some cases, where a guide sequence has a length of 25 nucleotides, and the target nucleic acid sequence has a length of 25 nucleotides, in some cases, the target nucleic acid-binding segment has 1 non-complementary nucleotide and 24 complementary nucleotides with the target nucleic acid sequence. As another example, in some cases, where a guide sequence has a length of 25 nucleotides, and the target nucleic acid sequence has a length of 25 nucleotides, in some cases, the target nucleic acid-binding segment has 2 non-complementary nucleotides and 23 complementary nucleotides with the target nucleic acid sequence.

[0179] The duplex-forming segment of a type V or type VI CRISPR/Cas guide RNA (e.g., cpf1 guide RNA) (e.g., of a targeter RNA or an activator RNA) can have a length of from 15 nt to 25 nt (e.g., 15 nt, 16 nt, 17 nt, 18 nt, 19 nt, 20 nt, 21 nt, 22 nt, 23 nt, 24 nt, or 25 nt).

[0180] The RNA duplex of a type V or type VI CRISPR/Cas guide RNA (e.g., cpf1 guide RNA) can have a length of from 5 base pairs (bp) to 40 bp (e.g., from 5 to 35 bp, 5 to 30 bp, 5 to 25 bp, 5 to 20 bp, 5 to 15 bp, 5-12 bp, 5-10 bp, 5-8 bp, 6 to 40 bp, 6 to 35 bp, 6 to 30 bp, 6 to 25 bp, 6 to 20 bp, 6 to 15 bp, 6 to 12 bp, 6 to 10 bp, 6 to 8 bp, 7 to 40 bp, 7 to 35 bp, 7 to 30 bp, 7 to 25 bp, 7 to 20 bp, 7 to 15 bp, 7 to 12 bp, 7 to 10 bp, 8 to 40 bp, 8 to 35 bp, 8 to 30 bp, 8 to 25 bp, 8 to 20 bp, 8 to 15 bp, 8 to 12 bp, 8 to 10 bp, 9 to 40 bp, 9 to 35 bp, 9 to 30 bp, 9 to 25 bp, 9 to 20 bp, 9 to 15 bp, 9 to 12 bp, 9 to 10 bp, 10 to 40 bp, 10 to 35 bp, 10 to 30 bp, 10 to 25 bp, 10 to 20 bp, 10 to 15 bp, or 10 to 12 bp).

[0181] As an example, a duplex-forming segment of a Cpf1 guide RNA can comprise a nucleotide sequence selected from (5′ to 3′): AAUUUCUACUGUUGUAGAU (SEQ ID NO: 1096), AAUUUCUGCUGUUGCAGAU (SEQ ID NO: 1097), AAUUUCCACUGUUGUGGAU (SEQ ID NO: 1098), AAUUCCUACUGUUGUAGGU (SEQ ID NO: 1099), AAUUUCUACUAUUGUAGAU (SEQ ID NO: 1100), AAUUUCUACUGCUGUAGAU (SEQ ID NO: 1101), AAUUUCUACUUUGUAGAU (SEQ ID NO: 1102), and AAUUUCUACUUGUAGAU (SEQ ID NO: 1103). The guide sequence can then follow (5′ to 3′) the duplex forming segment.

[0182] A non-limiting example of an activator RNA (e.g. tracrRNA) of a C2c1 guide RNA (dual guide or single guide) is an RNA that includes the nucleotide sequence GAAUUUUUCAACGGGUGUGCCAAUGGCCACUUUCCAGGUGGCAAAGCCCGUUGAGCUUCUCAAAAAG (SEQ ID NO: 1104). In some cases, a C2c1 guide RNA (dual guide or single guide) is an RNA that includes the nucleotide sequence In some cases, a C2c1 guide RNA (dual guide or single guide) is an RNA that includes the nucleotide sequence GUCUAGAGGACAGAAUUUUUCAACGGGUGUGCCAAUGGCCACUUUCCAGGUGGCAAAGCCCGUUGAGCUUCUCAAAAAG (SEQ ID NO: 1105). In some cases, a C2c1 guide RNA (dual guide or single guide) is an RNA that includes the nucleotide sequence UCUAGAGGACAGAAUUUUUCAACGGGUGUGCCAAUGGCCACUUUCCAGGUGGCAAAGCCCGUUGAGCUUCUCAAAAAG (SEQ ID NO: 1106). A non-limiting example of an activator RNA (e.g. tracrRNA) of a C2c1 guide RNA (dual guide or single guide) is an RNA that includes the nucleotide sequence ACUUUCCAGGCAAAGCCCGUUGAGCUUCUCAAAAAG (SEQ ID NO: 1107). In some cases, a duplex forming segment of a C2c1 guide RNA (dual guide or single guide) of an activator RNA (e.g. tracrRNA) includes the nucleotide sequence AGCUUCUCA (SEQ ID NO: 1108) or the nucleotide sequence GCUUCUCA (SEQ ID NO: 1109) (the duplex forming segment from a naturally existing tracrRNA.

[0183] A non-limiting example of a targeter RNA (e.g. crRNA) of a C2c1 guide RNA (dual guide or single guide) is an RNA with the nucleotide sequence CUGAGAAGUGGCACNNNNNNNNNNNNNNNNNNNN (SEQ ID NO: 1110), where the Ns represent the guide sequence, which will vary depending on the target sequence, and although 20 Ns are depicted a range of different lengths are acceptable. In some cases, a duplex forming segment of a C2c1 guide RNA (dual guide or single guide) of a targeter RNA (e.g. crRNA) includes the nucleotide sequence CUGAGAAGUGGCAC (SEQ ID NO: 1111) or includes the nucleotide sequence CUGAGAAGU (SEQ ID NO: 1112) or includes the nucleotide sequence UGAGAAGUGGCAC (SEQ ID NO: 1113) or includes the nucleotide sequence UGAGAAGU (SEQ ID NO: 1114).

[0184] Examples and guidance related to type V or type VI CRISPR/Cas endonucleases and guide RNAs (as well as information regarding requirements related to protospacer adjacent motif (PAM) sequences present in targeted nucleic acids) can be found in the art, for example, see Zetsche et al., Cell. 2015 Oct. 22; 163(3):759-71; Makarova et al., Nat Rev Microbiol. 2015 November; 13(11):722-36; and Shmakov et al., Mol Cell. 2015 Nov. 5; 60(3):385-97.

### Nucleic Acid Modifications

[0185] In some embodiments, a subject nucleic acid (e.g., a DNA or an RNA encoding a fusion polypeptide of the present disclosure; a DNA or RNA encoding an RNA guided endonuclease; a guide RNA, etc.) has one or more modifications, e.g., a base modification, a backbone modification, a sugar modification, etc., to provide the nucleic acid with a new or enhanced feature (e.g., improved stability). A nucleoside is a base-sugar combination. The base portion of the nucleoside is normally a heterocyclic base. The two most common classes of such heterocyclic bases are the purines and the pyrimidines. Nucleotides are nucleosides that further include a phosphate group covalently linked to the sugar portion of the nucleoside. For those nucleosides that include a pentofuranosyl sugar, the phosphate group can be linked to the 2′, the 3′, or the 5′ hydroxyl moiety of the sugar. In forming oligonucleotides, the phosphate groups covalently link adjacent nucleosides to one another to form a linear polymeric compound. In turn, the respective ends of this linear polymeric compound can be further joined to form a circular compound, however, linear compounds are suitable. In addition, linear compounds may have internal nucleotide base complementarity and may therefore fold in a manner as to produce a fully or partially double-stranded compound. Within oligonucleotides, the phosphate groups are commonly referred to as forming the internucleoside backbone of the oligonucleotide. The normal linkage or backbone of RNA and DNA is a 3′ to 5′ phosphodiester linkage.

[0186] Suitable nucleic acid modifications include, but are not limited to: 2′Omethyl modified nucleotides, 2′ Fluoro modified nucleotides, locked nucleic acid (LNA) modified nucleotides, peptide nucleic acid (PNA) modified nucleotides, nucleotides with phosphorothioate linkages, and a 5′ cap (e.g., a 7-methylguanylate cap (m7G)). Additional details and additional modifications are described below.

[0187] In some cases, 2% or more of the nucleotides of a nucleic acid (e.g., a guide RNA, etc.) are modified (e.g., 3% or more, 5% or more, 7.5% or more, 10% or more, 15% or more, 20% or more, 25% or more, 30% or more, 35% or more, 40% or more, 45% or more, 50% or more, 55% or more, 60% or more, 65% or more, 75% or more, 80% or more, 85% or more, 90% or more, 95% or more, or 100% of the nucleotides of a subject nucleic acid are modified). In some cases, 2% or more of the nucleotides of a subject guide RNA are modified (e.g., 3% or more, 5% or more, 7.5% or more, 10% or more, 15% or more, 20% or more, 25% or more, 30% or more, 35% or more, 40% or more, 45% or more, 50% or more, 55% or more, 60% or more, 65% or more, 75% or more, 80% or more, 85% or more, 90% or more, 95% or more, or 100% of the nucleotides of a subject guide RNA are modified). In some cases, 2% or more of the nucleotides of a guide RNA are modified (e.g., 3% or more, 5% or more, 7.5% or more, 10% or more, 15% or more, 20% or more, 25% or more, 30% or more, 35% or more, 40% or more, 45% or more, 50% or more, 55% or more, 60% or more, 65% or more, 75% or more, 80% or more, 85% or more, 90% or more, 95% or more, or 100% of the nucleotides of a guide RNA are modified).

[0188] In some cases, the number of nucleotides of a subject nucleic acid nucleic acid (e.g., a guide RNA, etc.) that are modified is in a range of from 3% to 100% (e.g., 3% to 100%, 3% to 95%, 3% to 90%, 3% to 85%, 3% to 80%, 3% to 75%, 3% to 70%, 3% to 65%, 3% to 60%, 3% to 55%, 3% to 50%, 3% to 45%, 3% to 40%, 5% to 100%, 5% to 95%, 5% to 90%, 5% to 85%, 5% to 80%, 5% to 75%, 5% to 70%, 5% to 65%, 5% to 60%, 5% to 55%, 5% to 50%, 5% to 45%, 5% to 40%, 10% to 100%, 10% to 95%, 10% to 90%, 10% to 85%, 10% to 80%, 10% to 75%, 10% to 70%, 10% to 65%, 10% to 60%, 10% to 55%, 10% to 50%, 10% to 45%, or 10% to 40%). In some cases, the number of nucleotides of a subject that are modified is in a range of from 3% to 100% (e.g., 3% to 100%, 3% to 95%, 3% to 90%, 3% to 85%, 3% to 80%, 3% to 75%, 3% to 70%, 3% to 65%, 3% to 60%, 3% to 55%, 3% to 50%, 3% to 45%, 3% to 40%, 5% to 100%, 5% to 95%, 5% to 90%, 5% to 85%, 5% to 80%, 5% to 75%, 5% to 70%, 5% to 65%, 5% to 60%, 5% to 55%, 5% to 50%, 5% to 45%, 5% to 40%, 10% to 100%, 10% to 95%, 10% to 90%, 10% to 85%, 10% to 80%, 10% to 75%, 10% to 70%, 10% to 65%, 10% to 60%, 10% to 55%, 10% to 50%, 10% to 45%, or 10% to 40%). In some cases, the number of nucleotides of a guide RNA that are modified is in a range of from 3% to 100% (e.g., 3% to 100%, 3% to 95%, 3% to 90%, 3% to 85%, 3% to 80%, 3% to 75%, 3% to 70%, 3% to 65%, 3% to 60%, 3% to 55%, 3% to 50%, 3% to 45%, 3% to 40%, 5% to 100%, 5% to 95%, 5% to 90%, 5% to 85%, 5% to 80%, 5% to 75%, 5% to 70%, 5% to 65%, 5% to 60%, 5% to 55%, 5% to 50%, 5% to 45%, 5% to 40%, 10% to 100%, 10% to 95%, 10% to 90%, 10% to 85%, 10% to 80%, 10% to 75%, 10% to 70%, 10% to 65%, 10% to 60%, 10% to 55%, 10% to 50%, 10% to 45%, or 10% to 40%).

[0189] In some cases, one or more of the nucleotides of a nucleic acid (e.g., a guide RNA, etc.) are modified (e.g., 2 or more, 3 or more, 4 or more, 5 or more, 6 or more, 7 or more, 8 or more, 9 or more, 10 or more, 11 or more, 12 or more, 13 or more, 14 or more, 15 or more, 16 or more, 17 or more, 18 or more, 19 or more, 20 or more, 21 or more, 22 or more, or all of the nucleotides of a subject nucleic acid are modified). In some cases, one or more of the nucleotides of a subject guide RNA are modified (e.g., 2 or more, 3 or more, 4 or more, 5 or more, 6 or more, 7 or more, 8 or more, 9 or more, 10 or more, 11 or more, 12 or more, 13 or more, 14 or more, 15 or more, 16 or more, 17 or more, 18 or more, 19 or more, 20 or more, 21 or more, 22 or more, or all of the nucleotides of a subject guide RNA are modified). In some cases, one or more of the nucleotides of a guide RNA are modified (e.g., 2 or more, 3 or more, 4 or more, 5 or more, 6 or more, 7 or more, 8 or more, 9 or more, 10 or more, 11 or more, 12 or more, 13 or more, 14 or more, 15 or more, 16 or more, 17 or more, 18 or more, 19 or more, 20 or more, 21 or more, 22 or more, or all of the nucleotides of a guide RNA are modified).

[0190] In some cases, 99% or less of the nucleotides of a nucleic acid (e.g., a guide RNA, etc.) are modified (e.g., 99% or less, 95% or less, 90% or less, 85% or less, 80% or less, 75% or less, 70% or less, 65% or less, 60% or less, 55% or less, 50% or less, or 45% or less of the nucleotides of a subject nucleic acid are modified). In some cases, 99% or less of the nucleotides of a subject guide RNA are modified (e.g., e.g., 99% or less, 95% or less, 90% or less, 85% or less, 80% or less, 75% or less, 70% or less, 65% or less, 60% or less, 55% or less, 50% or less, or 45% or less of the nucleotides of a subject guide RNA are modified). In some cases, 99% or less of the nucleotides of a guide RNA are modified (e.g., 99% or less, 95% or less, 90% or less, 85% or less, 80% or less, 75% or less, 70% or less, 65% or less, 60% or less, 55% or less, 50% or less, or 45% or less of the nucleotides of a guide RNA are modified).

[0191] In some cases, the number of nucleotides of a nucleic acid nucleic acid (e.g., a guide RNA, etc.) that are modified is in a range of from 1 to 30 (e.g., 1 to 25, 1 to 20, 1 to 18, 1 to 15, 1 to 10, 2 to 25, 2 to 20, 2 to 18, 2 to 15, 2 to 10, 3 to 25, 3 to 20, 3 to 18, 3 to 15, or 3 to 10). In some cases, the number of nucleotides of a subject guide RNA that are modified is in a range of from 1 to 30 (e.g., 1 to 25, 1 to 20, 1 to 18, 1 to 15, 1 to 10, 2 to 25, 2 to 20, 2 to 18, 2 to 15, 2 to 10, 3 to 25, 3 to 20, 3 to 18, 3 to 15, or 3 to 10). In some cases, the number of nucleotides of a guide RNA that are modified is in a range of from 1 to 30 (e.g., 1 to 25, 1 to 20, 1 to 18, 1 to 15, 1 to 10, 2 to 25, 2 to 20, 2 to 18, 2 to 15, 2 to 10, 3 to 25, 3 to 20, 3 to 18, 3 to 15, or 3 to 10).

[0192] In some cases, 20 or fewer of the nucleotides of a nucleic acid (e.g., a guide RNA, etc.) are modified (e.g., 19 or fewer, 18 or fewer, 17 or fewer, 16 or fewer, 15 or fewer, 14 or fewer, 13 or fewer, 12 or fewer, 11 or fewer, 10 or fewer, 9 or fewer, 8 or fewer, 7 or fewer, 6 or fewer, 5 or fewer, 4 or fewer, 3 or fewer, 2 or fewer, or one, of the nucleotides of a subject nucleic acid are modified). In some cases, 20 or fewer of the nucleotides of a subject guide RNA are modified (e.g., 19 or fewer, 18 or fewer, 17 or fewer, 16 or fewer, 15 or fewer, 14 or fewer, 13 or fewer, 12 or fewer, 11 or fewer, 10 or fewer, 9 or fewer, 8 or fewer, 7 or fewer, 6 or fewer, 5 or fewer, 4 or fewer, 3 or fewer, 2 or fewer, or one, of the nucleotides of a subject guide RNA are modified). In some cases, 20 or fewer of the nucleotides of a guide RNA are modified (e.g., 19 or fewer, 18 or fewer, 17 or fewer, 16 or fewer, 15 or fewer, 14 or fewer, 13 or fewer, 12 or fewer, 11 or fewer, 10 or fewer, 9 or fewer, 8 or fewer, 7 or fewer, 6 or fewer, 5 or fewer, 4 or fewer, 3 or fewer, 2 or fewer, or one, of the nucleotides of a guide RNA are modified).

[0193] A 2′-O-Methyl modified nucleotide (also referred to as 2′-O-Methyl RNA) is a naturally occurring modification of RNA found in tRNA and other small RNAs that arises as a post-transcriptional modification. Oligonucleotides can be directly synthesized that contain 2′-O-Methyl RNA. This modification increases Tm of RNA:RNA duplexes but results in only small changes in RNA:DNA stability. It is stable with respect to attack by single-stranded ribonucleases and is typically 5 to 10-fold less susceptible to DNases than DNA. It is commonly used in antisense oligos as a means to increase stability and binding affinity to the target message.

[0194] In some cases, 2% or more of the nucleotides of a nucleic acid (e.g., a guide RNA, etc.) are 2′-O-Methyl modified (e.g., 3% or more, 5% or more, 7.5% or more, 10% or more, 15% or more, 20% or more, 25% or more, 30% or more, 35% or more, 40% or more, 45% or more, 50% or more, 55% or more, 60% or more, 65% or more, 75% or more, 80% or more, 85% or more, 90% or more, 95% or more, or 100% of the nucleotides of a subject nucleic acid are 2′-O-Methyl modified). In some cases, 2% or more of the nucleotides of a subject guide RNA are 2′-O-Methyl modified (e.g., 3% or more, 5% or more, 7.5% or more, 10% or more, 15% or more, 20% or more, 25% or more, 30% or more, 35% or more, 40% or more, 45% or more, 50% or more, 55% or more, 60% or more, 65% or more, 75% or more, 80% or more, 85% or more, 90% or more, 95% or more, or 100% of the nucleotides of a subject guide RNA are 2′-O-Methyl modified). In some cases, 2% or more of the nucleotides of a guide RNA are 2′-O-Methyl modified (e.g., 3% or more, 5% or more, 7.5% or more, 10% or more, 15% or more, 20% or more, 25% or more, 30% or more, 35% or more, 40% or more, 45% or more, 50% or more, 55% or more, 60% or more, 65% or more, 75% or more, 80% or more, 85% or more, 90% or more, 95% or more, or 100% of the nucleotides of a guide RNA are 2′-O-Methyl modified).

[0195] In some cases, the number of nucleotides of a nucleic acid nucleic acid (e.g., a guide RNA, etc.) that are 2′-O-Methyl modified is in a range of from 3% to 100% (e.g., 3% to 100%, 3% to 95%, 3% to 90%, 3% to 85%, 3% to 80%, 3% to 75%, 3% to 70%, 3% to 65%, 3% to 60%, 3% to 55%, 3% to 50%, 3% to 45%, 3% to 40%, 5% to 100%, 5% to 95%, 5% to 90%, 5% to 85%, 5% to 80%, 5% to 75%, 5% to 70%, 5% to 65%, 5% to 60%, 5% to 55%, 5% to 50%, 5% to 45%, 5% to 40%, 10% to 100%, 10% to 95%, 10% to 90%, 10% to 85%, 10% to 80%, 10% to 75%, 10% to 70%, 10% to 65%, 10% to 60%, 10% to 55%, 10% to 50%, 10% to 45%, or 10% to 40%). In some cases, the number of nucleotides of a guide RNA that are 2′-O-Methyl modified is in a range of from 3% to 100% (e.g., 3% to 100%, 3% to 95%, 3% to 90%, 3% to 85%, 3% to 80%, 3% to 75%, 3% to 70%, 3% to 65%, 3% to 60%, 3% to 55%, 3% to 50%, 3% to 45%, 3% to 40%, 5% to 100%, 5% to 95%, 5% to 90%, 5% to 85%, 5% to 80%, 5% to 75%, 5% to 70%, 5% to 65%, 5% to 60%, 5% to 55%, 5% to 50%, 5% to 45%, 5% to 40%, 10% to 100%, 10% to 95%, 10% to 90%, 10% to 85%, 10% to 80%, 10% to 75%, 10% to 70%, 10% to 65%, 10% to 60%, 10% to 55%, 10% to 50%, 10% to 45%, or 10% to 40%). In some cases, the number of nucleotides of a guide RNA that are 2′-O-Methyl modified is in a range of from 3% to 100% (e.g., 3% to 100%, 3% to 95%, 3% to 90%, 3% to 85%, 3% to 80%, 3% to 75%, 3% to 70%, 3% to 65%, 3% to 60%, 3% to 55%, 3% to 50%, 3% to 45%, 3% to 40%, 5% to 100%, 5% to 95%, 5% to 90%, 5% to 85%, 5% to 80%, 5% to 75%, 5% to 70%, 5% to 65%, 5% to 60%, 5% to 55%, 5% to 50%, 5% to 45%, 5% to 40%, 10% to 100%, 10% to 95%, 10% to 90%, 10% to 85%, 10% to 80%, 10% to 75%, 10% to 70%, 10% to 65%, 10% to 60%, 10% to 55%, 10% to 50%, 10% to 45%, or 10% to 40%).

[0196] In some cases, one or more of the nucleotides of a nucleic acid (e.g., a guide RNA, etc.) are 2′-O-Methyl modified (e.g., 2 or more, 3 or more, 4 or more, 5 or more, 6 or more, 7 or more, 8 or more, 9 or more, 10 or more, 11 or more, 12 or more, 13 or more, 14 or more, 15 or more, 16 or more, 17 or more, 18 or more, 19 or more, 20 or more, 21 or more, 22 or more, or all of the nucleotides of a subject nucleic acid are 2′-O-Methyl modified). In some cases, one or more of the nucleotides of a guide RNA are 2′-O-Methyl modified (e.g., 2 or more, 3 or more, 4 or more, 5 or more, 6 or more, 7 or more, 8 or more, 9 or more, 10 or more, 11 or more, 12 or more, 13 or more, 14 or more, 15 or more, 16 or more, 17 or more, 18 or more, 19 or more, 20 or more, 21 or more, 22 or more, or all of the nucleotides of a subject guide RNA are 2′-O-Methyl modified). In some cases, one or more of the nucleotides of a guide RNA are 2′-O-Methyl modified (e.g., 2 or more, 3 or more, 4 or more, 5 or more, 6 or more, 7 or more, 8 or more, 9 or more, 10 or more, 11 or more, 12 or more, 13 or more, 14 or more, 15 or more, 16 or more, 17 or more, 18 or more, 19 or more, 20 or more, 21 or more, 22 or more, or all of the nucleotides of a guide RNA are 2′-O-Methyl modified).

[0197] In some cases, 99% or less of the nucleotides of a nucleic acid (e.g., a guide RNA, etc.) are 2′-O-Methyl modified (e.g., 99% or less, 95% or less, 90% or less, 85% or less, 80% or less, 75% or less, 70% or less, 65% or less, 60% or less, 55% or less, 50% or less, or 45% or less of the nucleotides of a subject nucleic acid are 2′-O-Methyl modified). In some cases, 99% or less of the nucleotides of a subject guide RNA are 2′-O-Methyl modified (e.g., e.g., 99% or less, 95% or less, 90% or less, 85% or less, 80% or less, 75% or less, 70% or less, 65% or less, 60% or less, 55% or less, 50% or less, or 45% or less of the nucleotides of a subject guide RNA are 2′-O-Methyl modified). In some cases, 99% or less of the nucleotides of a guide RNA are 2′-O-Methyl modified (e.g., 99% or less, 95% or less, 90% or less, 85% or less, 80% or less, 75% or less, 70% or less, 65% or less, 60% or less, 55% or less, 50% or less, or 45% or less of the nucleotides of a guide RNA are 2′-O-Methyl modified).

[0198] In some cases, the number of nucleotides of a nucleic acid nucleic acid (e.g., a guide RNA, etc.) that are 2′-O-Methyl modified is in a range of from 1 to 30 (e.g., 1 to 25, 1 to 20, 1 to 18, 1 to 15, 1 to 10, 2 to 25, 2 to 20, 2 to 18, 2 to 15, 2 to 10, 3 to 25, 3 to 20, 3 to 18, 3 to 15, or 3 to 10). In some cases, the number of nucleotides of a subject guide RNA that are 2′-O-Methyl modified is in a range of from 1 to 30 (e.g., 1 to 25, 1 to 20, 1 to 18, 1 to 15, 1 to 10, 2 to 25, 2 to 20, 2 to 18, 2 to 15, 2 to 10, 3 to 25, 3 to 20, 3 to 18, 3 to 15, or 3 to 10). In some cases, the number of nucleotides of a guide RNA that are 2′-O-Methyl modified is in a range of from 1 to 30 (e.g., 1 to 25, 1 to 20, 1 to 18, 1 to 15, 1 to 10, 2 to 25, 2 to 20, 2 to 18, 2 to 15, 2 to 10, 3 to 25, 3 to 20, 3 to 18, 3 to 15, or 3 to 10).

[0199] In some cases, 20 or fewer of the nucleotides of a nucleic acid (e.g., a guide RNA, etc.) are 2′-O-Methyl modified (e.g., 19 or fewer, 18 or fewer, 17 or fewer, 16 or fewer, 15 or fewer, 14 or fewer, 13 or fewer, 12 or fewer, 11 or fewer, 10 or fewer, 9 or fewer, 8 or fewer, 7 or fewer, 6 or fewer, 5 or fewer, 4 or fewer, 3 or fewer, 2 or fewer, or one, of the nucleotides of a subject nucleic acid are 2′-O-Methyl modified). In some cases, 20 or fewer of the nucleotides of a subject guide RNA are 2′-O-Methyl modified (e.g., 19 or fewer, 18 or fewer, 17 or fewer, 16 or fewer, 15 or fewer, 14 or fewer, 13 or fewer, 12 or fewer, 11 or fewer, 10 or fewer, 9 or fewer, 8 or fewer, 7 or fewer, 6 or fewer, 5 or fewer, 4 or fewer, 3 or fewer, 2 or fewer, or one, of the nucleotides of a subject guide RNA are 2′-O-Methyl modified). In some cases, 20 or fewer of the nucleotides of a guide RNA are 2′-O-Methyl modified (e.g., 19 or fewer, 18 or fewer, 17 or fewer, 16 or fewer, 15 or fewer, 14 or fewer, 13 or fewer, 12 or fewer, 11 or fewer, 10 or fewer, 9 or fewer, 8 or fewer, 7 or fewer, 6 or fewer, 5 or fewer, 4 or fewer, 3 or fewer, 2 or fewer, or one, of the nucleotides of a guide RNA are 2′-O-Methyl modified).

[0200] 2′ Fluoro modified nucleotides (e.g., 2′ Fluoro bases) have a fluorine modified ribose which increases binding affinity (Tm) and also confers some relative nuclease resistance when compared to native RNA. These modifications are commonly employed in ribozymes and siRNAs to improve stability in serum or other biological fluids.

[0201] In some cases, 2% or more of the nucleotides of a nucleic acid (e.g., a guide RNA, etc.) are 2′ Fluoro modified (e.g., 3% or more, 5% or more, 7.5% or more, 10% or more, 15% or more, 20% or more, 25% or more, 30% or more, 35% or more, 40% or more, 45% or more, 50% or more, 55% or more, 60% or more, 65% or more, 75% or more, 80% or more, 85% or more, 90% or more, 95% or more, or 100% of the nucleotides of a subject nucleic acid are 2′ Fluoro modified). In some cases, 2% or more of the nucleotides of a subject guide RNA are 2′ Fluoro modified (e.g., 3% or more, 5% or more, 7.5% or more, 10% or more, 15% or more, 20% or more, 25% or more, 30% or more, 35% or more, 40% or more, 45% or more, 50% or more, 55% or more, 60% or more, 65% or more, 75% or more, 80% or more, 85% or more, 90% or more, 95% or more, or 100% of the nucleotides of a subject guide RNA are 2′ Fluoro modified). In some cases, 2% or more of the nucleotides of a guide RNA are 2′ Fluoro modified (e.g., 3% or more, 5% or more, 7.5% or more, 10% or more, 15% or more, 20% or more, 25% or more, 30% or more, 35% or more, 40% or more, 45% or more, 50% or more, 55% or more, 60% or more, 65% or more, 75% or more, 80% or more, 85% or more, 90% or more, 95% or more, or 100% of the nucleotides of a guide RNA are 2′ Fluoro modified).

[0202] In some cases, the number of nucleotides of a nucleic acid nucleic acid (e.g., a guide RNA, etc.) that are 2′ Fluoro modified is in a range of from 3% to 100% (e.g., 3% to 100%, 3% to 95%, 3% to 90%, 3% to 85%, 3% to 80%, 3% to 75%, 3% to 70%, 3% to 65%, 3% to 60%, 3% to 55%, 3% to 50%, 3% to 45%, 3% to 40%, 5% to 100%, 5% to 95%, 5% to 90%, 5% to 85%, 5% to 80%, 5% to 75%, 5% to 70%, 5% to 65%, 5% to 60%, 5% to 55%, 5% to 50%, 5% to 45%, 5% to 40%, 10% to 100%, 10% to 95%, 10% to 90%, 10% to 85%, 10% to 80%, 10% to 75%, 10% to 70%, 10% to 65%, 10% to 60%, 10% to 55%, 10% to 50%, 10% to 45%, or 10% to 40%). In some cases, the number of nucleotides of a guide RNA that are 2′ Fluoro modified is in a range of from 3% to 100% (e.g., 3% to 100%, 3% to 95%, 3% to 90%, 3% to 85%, 3% to 80%, 3% to 75%, 3% to 70%, 3% to 65%, 3% to 60%, 3% to 55%, 3% to 50%, 3% to 45%, 3% to 40%, 5% to 100%, 5% to 95%, 5% to 90%, 5% to 85%, 5% to 80%, 5% to 75%, 5% to 70%, 5% to 65%, 5% to 60%, 5% to 55%, 5% to 50%, 5% to 45%, 5% to 40%, 10% to 100%, 10% to 95%, 10% to 90%, 10% to 85%, 10% to 80%, 10% to 75%, 10% to 70%, 10% to 65%, 10% to 60%, 10% to 55%, 10% to 50%, 10% to 45%, or 10% to 40%). In some cases, the number of nucleotides of a guide RNA that are 2′ Fluoro modified is in a range of from 3% to 100% (e.g., 3% to 100%, 3% to 95%, 3% to 90%, 3% to 85%, 3% to 80%, 3% to 75%, 3% to 70%, 3% to 65%, 3% to 60%, 3% to 55%, 3% to 50%, 3% to 45%, 3% to 40%, 5% to 100%, 5% to 95%, 5% to 90%, 5% to 85%, 5% to 80%, 5% to 75%, 5% to 70%, 5% to 65%, 5% to 60%, 5% to 55%, 5% to 50%, 5% to 45%, 5% to 40%, 10% to 100%, 10% to 95%, 10% to 90%, 10% to 85%, 10% to 80%, 10% to 75%, 10% to 70%, 10% to 65%, 10% to 60%, 10% to 55%, 10% to 50%, 10% to 45%, or 10% to 40%).

[0203] In some cases, one or more of the nucleotides of a nucleic acid (e.g., a guide RNA, etc.) are 2′ Fluoro modified (e.g., 2 or more, 3 or more, 4 or more, 5 or more, 6 or more, 7 or more, 8 or more, 9 or more, 10 or more, 11 or more, 12 or more, 13 or more, 14 or more, 15 or more, 16 or more, 17 or more, 18 or more, 19 or more, 20 or more, 21 or more, 22 or more, or all of the nucleotides of a subject nucleic acid are 2′ Fluoro modified). In some cases, one or more of the nucleotides of a subject guide RNA are 2′ Fluoro modified (e.g., 2 or more, 3 or more, 4 or more, 5 or more, 6 or more, 7 or more, 8 or more, 9 or more, 10 or more, 11 or more, 12 or more, 13 or more, 14 or more, 15 or more, 16 or more, 17 or more, 18 or more, 19 or more, 20 or more, 21 or more, 22 or more, or all of the nucleotides of a guide RNA are 2′ Fluoro modified). In some cases, one or more of the nucleotides of a guide RNA are 2′ Fluoro modified (e.g., 2 or more, 3 or more, 4 or more, 5 or more, 6 or more, 7 or more, 8 or more, 9 or more, 10 or more, 11 or more, 12 or more, 13 or more, 14 or more, 15 or more, 16 or more, 17 or more, 18 or more, 19 or more, 20 or more, 21 or more, 22 or more, or all of the nucleotides of a guide RNA are 2′ Fluoro modified).

[0204] In some cases, 99% or less of the nucleotides of a nucleic acid (e.g., a guide RNA, etc.) are 2′ Fluoro modified (e.g., 99% or less, 95% or less, 90% or less, 85% or less, 80% or less, 75% or less, 70% or less, 65% or less, 60% or less, 55% or less, 50% or less, or 45% or less of the nucleotides of a subject nucleic acid are 2′ Fluoro modified). In some cases, 99% or less of the nucleotides of a subject guide RNA are 2′ Fluoro modified (e.g., e.g., 99% or less, 95% or less, 90% or less, 85% or less, 80% or less, 75% or less, 70% or less, 65% or less, 60% or less, 55% or less, 50% or less, or 45% or less of the nucleotides of a subject guide RNA are 2′ Fluoro modified). In some cases, 99% or less of the nucleotides of a guide RNA are 2′ Fluoro modified (e.g., 99% or less, 95% or less, 90% or less, 85% or less, 80% or less, 75% or less, 70% or less, 65% or less, 60% or less, 55% or less, 50% or less, or 45% or less of the nucleotides of a guide RNA are 2′ Fluoro modified).

[0205] In some cases, the number of nucleotides of a nucleic acid nucleic acid (e.g., a guide RNA, etc.) that are 2′ Fluoro modified is in a range of from 1 to 30 (e.g., 1 to 25, 1 to 20, 1 to 18, 1 to 15, 1 to 10, 2 to 25, 2 to 20, 2 to 18, 2 to 15, 2 to 10, 3 to 25, 3 to 20, 3 to 18, 3 to 15, or 3 to 10). In some cases, the number of nucleotides of a subject guide RNA that are 2′ Fluoro modified is in a range of from 1 to 30 (e.g., 1 to 25, 1 to 20, 1 to 18, 1 to 15, 1 to 10, 2 to 25, 2 to 20, 2 to 18, 2 to 15, 2 to 10, 3 to 25, 3 to 20, 3 to 18, 3 to 15, or 3 to 10). In some cases, the number of nucleotides of a guide RNA that are 2′ Fluoro modified is in a range of from 1 to 30 (e.g., 1 to 25, 1 to 20, 1 to 18, 1 to 15, 1 to 10, 2 to 25, 2 to 20, 2 to 18, 2 to 15, 2 to 10, 3 to 25, 3 to 20, 3 to 18, 3 to 15, or 3 to 10).

[0206] In some cases, 20 or fewer of the nucleotides of a nucleic acid (e.g., a guide RNA, etc.) are 2′ Fluoro modified (e.g., 19 or fewer, 18 or fewer, 17 or fewer, 16 or fewer, 15 or fewer, 14 or fewer, 13 or fewer, 12 or fewer, 11 or fewer, 10 or fewer, 9 or fewer, 8 or fewer, 7 or fewer, 6 or fewer, 5 or fewer, 4 or fewer, 3 or fewer, 2 or fewer, or one, of the nucleotides of a subject nucleic acid are 2′ Fluoro modified). In some cases, 20 or fewer of the nucleotides of a subject guide RNA are 2′ Fluoro modified (e.g., 19 or fewer, 18 or fewer, 17 or fewer, 16 or fewer, 15 or fewer, 14 or fewer, 13 or fewer, 12 or fewer, 11 or fewer, 10 or fewer, 9 or fewer, 8 or fewer, 7 or fewer, 6 or fewer, 5 or fewer, 4 or fewer, 3 or fewer, 2 or fewer, or one, of the nucleotides of a subject guide RNA are 2′ Fluoro modified). In some cases, 20 or fewer of the nucleotides of a guide RNA are 2′ Fluoro modified (e.g., 19 or fewer, 18 or fewer, 17 or fewer, 16 or fewer, 15 or fewer, 14 or fewer, 13 or fewer, 12 or fewer, 11 or fewer, 10 or fewer, 9 or fewer, 8 or fewer, 7 or fewer, 6 or fewer, 5 or fewer, 4 or fewer, 3 or fewer, 2 or fewer, or one, of the nucleotides of a guide RNA are 2′ Fluoro modified).

[0207] LNA bases have a modification to the ribose backbone that locks the base in the C3′-endo position, which favors RNA A-type helix duplex geometry. This modification significantly increases Tm and is also very nuclease resistant. Multiple LNA insertions can be placed in an oligo at any position except the 3′-end. Applications have been described ranging from antisense oligos to hybridization probes to SNP detection and allele specific PCR. Due to the large increase in Tm conferred by LNAs, they also can cause an increase in primer dimer formation as well as self-hairpin formation. In some cases, the number of LNAs incorporated into a single oligo is 10 bases or less.

[0208] In some cases, the number of nucleotides of a nucleic acid nucleic acid (e.g., a guide RNA, etc.) that have an LNA base is in a range of from 3% to 99% (e.g., 3% to 99%, 3% to 95%, 3% to 90%, 3% to 85%, 3% to 80%, 3% to 75%, 3% to 70%, 3% to 65%, 3% to 60%, 3% to 55%, 3% to 50%, 3% to 45%, 3% to 40%, 5% to 99%, 5% to 95%, 5% to 90%, 5% to 85%, 5% to 80%, 5% to 75%, 5% to 70%, 5% to 65%, 5% to 60%, 5% to 55%, 5% to 50%, 5% to 45%, 5% to 40%, 10% to 99%, 10% to 95%, 10% to 90%, 10% to 85%, 10% to 80%, 10% to 75%, 10% to 70%, 10% to 65%, 10% to 60%, 10% to 55%, 10% to 50%, 10% to 45%, or 10% to 40%). In some cases, the number of nucleotides of a guide RNA that have an LNA base is in a range of from 3% to 99% (e.g., 3% to 99%, 3% to 95%, 3% to 90%, 3% to 85%, 3% to 80%, 3% to 75%, 3% to 70%, 3% to 65%, 3% to 60%, 3% to 55%, 3% to 50%, 3% to 45%, 3% to 40%, 5% to 99%, 5% to 95%, 5% to 90%, 5% to 85%, 5% to 80%, 5% to 75%, 5% to 70%, 5% to 65%, 5% to 60%, 5% to 55%, 5% to 50%, 5% to 45%, 5% to 40%, 10% to 99%, 10% to 95%, 10% to 90%, 10% to 85%, 10% to 80%, 10% to 75%, 10% to 70%, 10% to 65%, 10% to 60%, 10% to 55%, 10% to 50%, 10% to 45%, or 10% to 40%). In some cases, the number of nucleotides of a guide RNA that have an LNA base is in a range of from 3% to 99% (e.g., 3% to 99%, 3% to 95%, 3% to 90%, 3% to 85%, 3% to 80%, 3% to 75%, 3% to 70%, 3% to 65%, 3% to 60%, 3% to 55%, 3% to 50%, 3% to 45%, 3% to 40%, 5% to 99%, 5% to 95%, 5% to 90%, 5% to 85%, 5% to 80%, 5% to 75%, 5% to 70%, 5% to 65%, 5% to 60%, 5% to 55%, 5% to 50%, 5% to 45%, 5% to 40%, 10% to 99%, 10% to 95%, 10% to 90%, 10% to 85%, 10% to 80%, 10% to 75%, 10% to 70%, 10% to 65%, 10% to 60%, 10% to 55%, 10% to 50%, 10% to 45%, or 10% to 40%).

[0209] In some cases, one or more of the nucleotides of a nucleic acid (e.g., a guide RNA, etc.) have an LNA base (e.g., 2 or more, 3 or more, 4 or more, 5 or more, 6 or more, 7 or more, 8 or more, 9 or more, 10 or more, 11 or more, 12 or more, 13 or more, 14 or more, 15 or more, 16 or more, 17 or more, 18 or more, 19 or more, 20 or more, 21 or more, 22 or more, or all of the nucleotides of a subject nucleic acid have an LNA base). In some cases, one or more of the nucleotides of a subject guide RNA have an LNA base (e.g., 2 or more, 3 or more, 4 or more, 5 or more, 6 or more, 7 or more, 8 or more, 9 or more, 10 or more, 11 or more, 12 or more, 13 or more, 14 or more, 15 or more, 16 or more, 17 or more, 18 or more, 19 or more, 20 or more, 21 or more, 22 or more, or all of the nucleotides of a subject guide RNA have an LNA base). In some cases, one or more of the nucleotides of a guide RNA have an LNA base (e.g., 2 or more, 3 or more, 4 or more, 5 or more, 6 or more, 7 or more, 8 or more, 9 or more, 10 or more, 11 or more, 12 or more, 13 or more, 14 or more, 15 or more, 16 or more, 17 or more, 18 or more, 19 or more, 20 or more, 21 or more, 22 or more, or all of the nucleotides of a guide RNA have an LNA base).

[0210] In some cases, 99% or less of the nucleotides of a nucleic acid (e.g., a guide RNA, etc.) have an LNA base (e.g., 99% or less, 95% or less, 90% or less, 85% or less, 80% or less, 75% or less, 70% or less, 65% or less, 60% or less, 55% or less, 50% or less, or 45% or less of the nucleotides of a subject nucleic acid have an LNA base). In some cases, 99% or less of the nucleotides of a guide RNA have an LNA base (e.g., e.g., 99% or less, 95% or less, 90% or less, 85% or less, 80% or less, 75% or less, 70% or less, 65% or less, 60% or less, 55% or less, 50% or less, or 45% or less of the nucleotides of a guide RNA have an LNA base). In some cases, 99% or less of the nucleotides of a guide RNA have an LNA base (e.g., 99% or less, 95% or less, 90% or less, 85% or less, 80% or less, 75% or less, 70% or less, 65% or less, 60% or less, 55% or less, 50% or less, or 45% or less of the nucleotides of a guide RNA have an LNA base).

[0211] In some cases, the number of nucleotides of a nucleic acid nucleic acid (e.g., a guide RNA, etc.) that have an LNA base is in a range of from 1 to 30 (e.g., 1 to 25, 1 to 20, 1 to 18, 1 to 15, 1 to 10, 2 to 25, 2 to 20, 2 to 18, 2 to 15, 2 to 10, 3 to 25, 3 to 20, 3 to 18, 3 to 15, or 3 to 10). In some cases, the number of nucleotides of a guide RNA that have an LNA base is in a range of from 1 to 30 (e.g., 1 to 25, 1 to 20, 1 to 18, 1 to 15, 1 to 10, 2 to 25, 2 to 20, 2 to 18, 2 to 15, 2 to 10, 3 to 25, 3 to 20, 3 to 18, 3 to 15, or 3 to 10). In some cases, the number of nucleotides of a guide RNA that have an LNA base is in a range of from 1 to 30 (e.g., 1 to 25, 1 to 20, 1 to 18, 1 to 15, 1 to 10, 2 to 25, 2 to 20, 2 to 18, 2 to 15, 2 to 10, 3 to 25, 3 to 20, 3 to 18, 3 to 15, or 3 to 10).

[0212] In some cases, 20 or fewer of the nucleotides of a nucleic acid (e.g., a guide RNA, etc.) have an LNA base (e.g., 19 or fewer, 18 or fewer, 17 or fewer, 16 or fewer, 15 or fewer, 14 or fewer, 13 or fewer, 12 or fewer, 11 or fewer, 10 or fewer, 9 or fewer, 8 or fewer, 7 or fewer, 6 or fewer, 5 or fewer, 4 or fewer, 3 or fewer, 2 or fewer, or one, of the nucleotides of a subject nucleic acid have an LNA base). In some cases, 20 or fewer of the nucleotides of a subject guide RNA have an LNA base (e.g., 19 or fewer, 18 or fewer, 17 or fewer, 16 or fewer, 15 or fewer, 14 or fewer, 13 or fewer, 12 or fewer, 11 or fewer, 10 or fewer, 9 or fewer, 8 or fewer, 7 or fewer, 6 or fewer, 5 or fewer, 4 or fewer, 3 or fewer, 2 or fewer, or one, of the nucleotides of a subject guide RNA have an LNA base). In some cases, 20 or fewer of the nucleotides of a guide RNA have an LNA base (e.g., 19 or fewer, 18 or fewer, 17 or fewer, 16 or fewer, 15 or fewer, 14 or fewer, 13 or fewer, 12 or fewer, 11 or fewer, 10 or fewer, 9 or fewer, 8 or fewer, 7 or fewer, 6 or fewer, 5 or fewer, 4 or fewer, 3 or fewer, 2 or fewer, or one, of the nucleotides of a guide RNA have an LNA base).

[0213] The phosphorothioate (PS) bond (i.e., a phosphorothioate linkage) substitutes a sulfur atom for a non-bridging oxygen in the phosphate backbone of a nucleic acid (e.g., an oligo). This modification renders the internucleotide linkage resistant to nuclease degradation. Phosphorothioate bonds can be introduced between the last 3-5 nucleotides at the 5′- or 3′-end of the oligo to inhibit exonuclease degradation. Including phosphorothioate bonds within the oligo (e.g., throughout the entire oligo) can help reduce attack by endonucleases as well.

[0214] In some cases, the number of nucleotides of a nucleic acid nucleic acid (e.g., a guide RNA, etc.) that have a phosphorothioate linkage is in a range of from 3% to 99% (e.g., 3% to 99%, 3% to 95%, 3% to 90%, 3% to 85%, 3% to 80%, 3% to 75%, 3% to 70%, 3% to 65%, 3% to 60%, 3% to 55%, 3% to 50%, 3% to 45%, 3% to 40%, 5% to 99%, 5% to 95%, 5% to 90%, 5% to 85%, 5% to 80%, 5% to 75%, 5% to 70%, 5% to 65%, 5% to 60%, 5% to 55%, 5% to 50%, 5% to 45%, 5% to 40%, 10% to 99%, 10% to 95%, 10% to 90%, 10% to 85%, 10% to 80%, 10% to 75%, 10% to 70%, 10% to 65%, 10% to 60%, 10% to 55%, 10% to 50%, 10% to 45%, or 10% to 40%). In some cases, the number of nucleotides of a guide RNA that have a phosphorothioate linkage is in a range of from 3% to 99% (e.g., 3% to 99%, 3% to 95%, 3% to 90%, 3% to 85%, 3% to 80%, 3% to 75%, 3% to 70%, 3% to 65%, 3% to 60%, 3% to 55%, 3% to 50%, 3% to 45%, 3% to 40%, 5% to 99%, 5% to 95%, 5% to 90%, 5% to 85%, 5% to 80%, 5% to 75%, 5% to 70%, 5% to 65%, 5% to 60%, 5% to 55%, 5% to 50%, 5% to 45%, 5% to 40%, 10% to 99%, 10% to 95%, 10% to 90%, 10% to 85%, 10% to 80%, 10% to 75%, 10% to 70%, 10% to 65%, 10% to 60%, 10% to 55%, 10% to 50%, 10% to 45%, or 10% to 40%). In some cases, the number of nucleotides of a guide RNA that have a phosphorothioate linkage is in a range of from 3% to 99% (e.g., 3% to 99%, 3% to 95%, 3% to 90%, 3% to 85%, 3% to 80%, 3% to 75%, 3% to 70%, 3% to 65%, 3% to 60%, 3% to 55%, 3% to 50%, 3% to 45%, 3% to 40%, 5% to 99%, 5% to 95%, 5% to 90%, 5% to 85%, 5% to 80%, 5% to 75%, 5% to 70%, 5% to 65%, 5% to 60%, 5% to 55%, 5% to 50%, 5% to 45%, 5% to 40%, 10% to 99%, 10% to 95%, 10% to 90%, 10% to 85%, 10% to 80%, 10% to 75%, 10% to 70%, 10% to 65%, 10% to 60%, 10% to 55%, 10% to 50%, 10% to 45%, or 10% to 40%).

[0215] In some cases, one or more of the nucleotides of a nucleic acid (e.g., a guide RNA, etc.) have a phosphorothioate linkage (e.g., 2 or more, 3 or more, 4 or more, 5 or more, 6 or more, 7 or more, 8 or more, 9 or more, 10 or more, 11 or more, 12 or more, 13 or more, 14 or more, 15 or more, 16 or more, 17 or more, 18 or more, 19 or more, 20 or more, 21 or more, 22 or more, or all of the nucleotides of a subject nucleic acid have a phosphorothioate linkage). In some cases, one or more of the nucleotides of a subject guide RNA have a phosphorothioate linkage (e.g., 2 or more, 3 or more, 4 or more, 5 or more, 6 or more, 7 or more, 8 or more, 9 or more, 10 or more, 11 or more, 12 or more, 13 or more, 14 or more, 15 or more, 16 or more, 17 or more, 18 or more, 19 or more, 20 or more, 21 or more, 22 or more, or all of the nucleotides of a subject guide RNA have a phosphorothioate linkage). In some cases, one or more of the nucleotides of a guide RNA have a phosphorothioate linkage (e.g., 2 or more, 3 or more, 4 or more, 5 or more, 6 or more, 7 or more, 8 or more, 9 or more, 10 or more, 11 or more, 12 or more, 13 or more, 14 or more, 15 or more, 16 or more, 17 or more, 18 or more, 19 or more, 20 or more, 21 or more, 22 or more, or all of the nucleotides of a guide RNA have a phosphorothioate linkage).

[0216] In some cases, 99% or less of the nucleotides of a nucleic acid (e.g., a guide RNA, etc.) have a phosphorothioate linkage (e.g., 99% or less, 95% or less, 90% or less, 85% or less, 80% or less, 75% or less, 70% or less, 65% or less, 60% or less, 55% or less, 50% or less, or 45% or less of the nucleotides of a subject nucleic acid have a phosphorothioate linkage). In some cases, 99% or less of the nucleotides of a subject guide RNA have a phosphorothioate linkage (e.g., e.g., 99% or less, 95% or less, 90% or less, 85% or less, 80% or less, 75% or less, 70% or less, 65% or less, 60% or less, 55% or less, 50% or less, or 45% or less of the nucleotides of a guide RNA have a phosphorothioate linkage). In some cases, 99% or less of the nucleotides of a guide RNA have a phosphorothioate linkage (e.g., 99% or less, 95% or less, 90% or less, 85% or less, 80% or less, 75% or less, 70% or less, 65% or less, 60% or less, 55% or less, 50% or less, or 45% or less of the nucleotides of a guide RNA have a phosphorothioate linkage).

[0217] In some cases, the number of nucleotides of a nucleic acid nucleic acid (e.g., a guide RNA, etc.) that have a phosphorothioate linkage is in a range of from 1 to 30 (e.g., 1 to 25, 1 to 20, 1 to 18, 1 to 15, 1 to 10, 2 to 25, 2 to 20, 2 to 18, 2 to 15, 2 to 10, 3 to 25, 3 to 20, 3 to 18, 3 to 15, or 3 to 10). In some cases, the number of nucleotides of a guide RNA that have a phosphorothioate linkage is in a range of from 1 to 30 (e.g., 1 to 25, 1 to 20, 1 to 18, 1 to 15, 1 to 10, 2 to 25, 2 to 20, 2 to 18, 2 to 15, 2 to 10, 3 to 25, 3 to 20, 3 to 18, 3 to 15, or 3 to 10). In some cases, the number of nucleotides of a guide RNA that have a phosphorothioate linkage is in a range of from 1 to 30 (e.g., 1 to 25, 1 to 20, 1 to 18, 1 to 15, 1 to 10, 2 to 25, 2 to 20, 2 to 18, 2 to 15, 2 to 10, 3 to 25, 3 to 20, 3 to 18, 3 to 15, or 3 to 10).

[0218] In some cases, 20 or fewer of the nucleotides of a nucleic acid (e.g., a guide RNA, etc.) have a phosphorothioate linkage (e.g., 19 or fewer, 18 or fewer, 17 or fewer, 16 or fewer, 15 or fewer, 14 or fewer, 13 or fewer, 12 or fewer, 11 or fewer, 10 or fewer, 9 or fewer, 8 or fewer, 7 or fewer, 6 or fewer, 5 or fewer, 4 or fewer, 3 or fewer, 2 or fewer, or one, of the nucleotides of a subject nucleic acid have a phosphorothioate linkage). In some cases, 20 or fewer of the nucleotides of a guide RNA have a phosphorothioate linkage (e.g., 19 or fewer, 18 or fewer, 17 or fewer, 16 or fewer, 15 or fewer, 14 or fewer, 13 or fewer, 12 or fewer, 11 or fewer, 10 or fewer, 9 or fewer, 8 or fewer, 7 or fewer, 6 or fewer, 5 or fewer, 4 or fewer, 3 or fewer, 2 or fewer, or one, of the nucleotides of a subject guide RNA have a phosphorothioate linkage). In some cases, 20 or fewer of the nucleotides of a guide RNA have a phosphorothioate linkage (e.g., 19 or fewer, 18 or fewer, 17 or fewer, 16 or fewer, 15 or fewer, 14 or fewer, 13 or fewer, 12 or fewer, 11 or fewer, 10 or fewer, 9 or fewer, 8 or fewer, 7 or fewer, 6 or fewer, 5 or fewer, 4 or fewer, 3 or fewer, 2 or fewer, or one, of the nucleotides of a guide RNA have a phosphorothioate linkage).

[0219] In some cases, a nucleic acid (e.g., a guide RNA, etc.) has one or more nucleotides that are 2′-O-Methyl modified nucleotides. In some embodiments, a subject nucleic acid (e.g., a guide RNA, etc.) has one or more 2′ Fluoro modified nucleotides. In some cases, a subject nucleic acid (e.g., a guide RNA, etc.) has one or more LNA bases. In some cases, a subject nucleic acid (e.g., a guide RNA, etc.) has one or more nucleotides that are linked by a phosphorothioate bond (i.e., the subject nucleic acid has one or more phosphorothioate linkages). In some embodiments, a subject nucleic acid (e.g., a guide RNA, etc.) has a 5′ cap (e.g., a 7-methylguanylate cap (m7G)).

[0220] In some cases, a nucleic acid (e.g., a DNA or RNA encoding an RNA guided endonuclease, a guide RNA, etc.) has a combination of modified nucleotides. For example, a nucleic acid can have a 5′ cap (e.g., a 7-methylguanylate cap (m7G)) in addition to having one or more nucleotides with other modifications (e.g., a 2′-O-Methyl nucleotide and/or a 2′ Fluoro modified nucleotide and/or a LNA base and/or a phosphorothioate linkage). A nucleic acid can have any combination of modifications. For example, a subject nucleic acid can have any combination of the above described modifications.

[0221] In some cases, a guide RNA has one or more nucleotides that are 2′-O-Methyl modified nucleotides. In some embodiments, a guide RNA has one or more 2′ Fluoro modified nucleotides. In some embodiments, a guide RNA has one or more LNA bases. In some embodiments, a guide RNA has one or more nucleotides that are linked by a phosphorothioate bond (i.e., the subject nucleic acid has one or more phosphorothioate linkages). In some embodiments, a guide RNA has a 5′ cap (e.g., a 7-methylguanylate cap (m7G)).

[0222] In some cases, a guide RNA has a combination of modified nucleotides. For example, a guide RNA can have a 5′ cap (e.g., a 7-methylguanylate cap (m7G)) in addition to having one or more nucleotides with other modifications (e.g., a 2′-O-Methyl nucleotide and/or a 2′ Fluoro modified nucleotide and/or a LNA base and/or a phosphorothioate linkage). A guide RNA can have any combination of modifications. For example, a guide RNA can have any combination of the above described modifications.

[0223] Modified Backbones and Modified Internucleoside Linkages

[0224] Examples of suitable nucleic acids containing modifications include nucleic acids containing modified backbones or non-natural internucleoside linkages. Nucleic acids having modified backbones include those that retain a phosphorus atom in the backbone and those that do not have a phosphorus atom in the backbone.

[0225] Suitable modified oligonucleotide backbones containing a phosphorus atom therein include, for example, phosphorothioates, chiral phosphorothioates, phosphorodithioates, phosphotriesters, aminoalkylphosphotriesters, methyl and other alkyl phosphonates including 3′-alkylene phosphonates, 5′-alkylene phosphonates and chiral phosphonates, phosphinates, phosphoramidates including 3′-amino phosphoramidate and aminoalkylphosphoramidates, phosphorodiamidates, thionophosphoramidates, thionoalkylphosphonates, thionoalkylphosphotriesters, selenophosphates and boranophosphates having normal 3′-5′ linkages, 2′-5′ linked analogs of these, and those having inverted polarity wherein one or more internucleotide linkages is a 3′ to 3′, 5′ to 5′ or 2′ to 2′ linkage. Suitable oligonucleotides having inverted polarity comprise a single 3′ to 3′ linkage at the 3′-most internucleotide linkage i.e. a single inverted nucleoside residue which may be a basic (the nucleobase is missing or has a hydroxyl group in place thereof). Various salts (such as, for example, potassium or sodium), mixed salts and free acid forms are also included.

[0226] In some cases, a nucleic acid comprises one or more phosphorothioate and/or heteroatom internucleoside linkages, in particular —CH₂—NH—O—CH₂—, —CH₂—N(CH₃)—O—CH₂— (known as a methylene (methylimino) or MMI backbone), —CH₂—O—N(CH₃)—CH₂—, —CH₂—N(CH₃)—N(CH₃)—CH₂— and —O—N(CH₃)—CH₂—CH₂— (wherein the native phosphodiester internucleotide linkage is represented as —O—P(═O)(OH)—O—CH₂—). MMI type internucleoside linkages are disclosed in the above referenced U.S. Pat. No. 5,489,677. Suitable amide internucleoside linkages are disclosed in t U.S. Pat. No. 5,602,240.

[0227] Also suitable are nucleic acids having morpholino backbone structures as described in, e.g., U.S. Pat. No. 5,034,506. For example, in some embodiments, a subject nucleic acid comprises a 6-membered morpholino ring in place of a ribose ring. In some of these embodiments, a phosphorodiamidate or other non-phosphodiester internucleoside linkage replaces a phosphodiester linkage.

[0228] Suitable modified polynucleotide backbones that do not include a phosphorus atom therein have backbones that are formed by short chain alkyl or cycloalkyl internucleoside linkages, mixed heteroatom and alkyl or cycloalkyl internucleoside linkages, or one or more short chain heteroatomic or heterocyclic internucleoside linkages. These include those having morpholino linkages (formed in part from the sugar portion of a nucleoside); siloxane backbones; sulfide, sulfoxide and sulfone backbones; formacetyl and thioformacetyl backbones; methylene formacetyl and thioformacetyl backbones; riboacetyl backbones; alkene containing backbones; sulfamate backbones; methyleneimino and methylenehydrazino backbones; sulfonate and sulfonamide backbones; amide backbones; and others having mixed N, O, S and CH₂ component parts.

[0229] Mimetics

[0230] A nucleic acid can be a nucleic acid mimetic. The term “mimetic” as it is applied to polynucleotides is intended to include polynucleotides wherein only the furanose ring or both the furanose ring and the internucleotide linkage are replaced with non-furanose groups, replacement of only the furanose ring is also referred to in the art as being a sugar surrogate. The heterocyclic base moiety or a modified heterocyclic base moiety is maintained for hybridization with an appropriate target nucleic acid. One such nucleic acid, a polynucleotide mimetic that has been shown to have excellent hybridization properties, is referred to as a peptide nucleic acid (PNA). In PNA, the sugar-backbone of a polynucleotide is replaced with an amide containing backbone, in particular an aminoethylglycine backbone. The nucleotides are retained and are bound directly or indirectly to aza nitrogen atoms of the amide portion of the backbone.

[0231] One polynucleotide mimetic that has been reported to have excellent hybridization properties is a peptide nucleic acid (PNA). The backbone in PNA compounds is two or more linked aminoethylglycine units which gives PNA an amide containing backbone. The heterocyclic base moieties are bound directly or indirectly to aza nitrogen atoms of the amide portion of the backbone. Representative U.S. patents that describe the preparation of PNA compounds include, but are not limited to: U.S. Pat. Nos. 5,539,082; 5,714,331; and 5,719,262.

[0232] Another class of polynucleotide mimetic that has been studied is based on linked morpholino units (morpholino nucleic acid) having heterocyclic bases attached to the morpholino ring. A number of linking groups have been reported that link the morpholino monomeric units in a morpholino nucleic acid. One class of linking groups has been selected to give a non-ionic oligomeric compound. The non-ionic morpholino-based oligomeric compounds are less likely to have undesired interactions with cellular proteins. Morpholino-based polynucleotides are non-ionic mimics of oligonucleotides which are less likely to form undesired interactions with cellular proteins (Dwaine A. Braasch and David R. Corey, Biochemistry, 2002, 41(14), 4503-4510). Morpholino-based polynucleotides are disclosed in U.S. Pat. No. 5,034,506. A variety of compounds within the morpholino class of polynucleotides have been prepared, having a variety of different linking groups joining the monomeric subunits.

[0233] A further class of polynucleotide mimetic is referred to as cyclohexenyl nucleic acids (CeNA). The furanose ring normally present in a DNA/RNA molecule is replaced with a cyclohexenyl ring. CeNA DMT protected phosphoramidite monomers have been prepared and used for oligomeric compound synthesis following classical phosphoramidite chemistry. Fully modified CeNA oligomeric compounds and oligonucleotides having specific positions modified with CeNA have been prepared and studied (see Wang et al., J. Am. Chem. Soc., 2000, 122, 8595-8602). In general the incorporation of CeNA monomers into a DNA chain increases its stability of a DNA/RNA hybrid. CeNA oligoadenylates formed complexes with RNA and DNA complements with similar stability to the native complexes. The study of incorporating CeNA structures into natural nucleic acid structures was shown by NMR and circular dichroism to proceed with easy conformational adaptation.

[0234] A further modification includes Locked Nucleic Acids (LNAs) in which the 2′-hydroxyl group is linked to the 4′ carbon atom of the sugar ring thereby forming a 2′-C,4′-C-oxymethylene linkage thereby forming a bicyclic sugar moiety. The linkage can be a methylene (—CH₂—), group bridging the 2′ oxygen atom and the 4′ carbon atom wherein n is 1 or 2 (Singh et al., Chem. Commun., 1998, 4, 455-456). LNA and LNA analogs display very high duplex thermal stabilities with complementary DNA and RNA (Tm=+3 to +10° C.), stability towards 3′-exonucleolytic degradation and good solubility properties. Potent and nontoxic antisense oligonucleotides containing LNAs have been described (e.g., Wahlestedt et al., Proc. Natl. Acad. Sci. U.S.A., 2000, 97, 5633-5638).

[0235] The synthesis and preparation of the LNA monomers adenine, cytosine, guanine, 5-methylcytosine, thymine and uracil, along with their oligomerization, and nucleic acid recognition properties have been described (e.g., Koshkin et al., Tetrahedron, 1998, 54, 3607-3630). LNAs and preparation thereof are also described in WO 98/39352 and WO 99/14226, as well as U.S. applications 20120165514, 20100216983, 20090041809, 20060117410, 20040014959, 20020094555, and 20020086998.

### Modified Sugar Moieties

[0236] A nucleic acid can also include one or more substituted sugar moieties. Suitable polynucleotides comprise a sugar substituent group selected from: OH; F; O-, S-, or N-alkyl; O-, S-, or N-alkenyl; O-, S- or N-alkynyl; or O-alkyl-O-alkyl, wherein the alkyl, alkenyl and alkynyl may be substituted or unsubstituted C₁ to C₁₀ alkyl or C₂ to C₁₀ alkenyl and alkynyl. Particularly suitable are O((CH₂)ₙO)ₘCH₃, O(CH₂)ₙOCH₃, O(CH₂)ₙNH₂, O(CH₂)ₙCH₃, O(CH₂)ₙONH₂, and O(CH₂)ₙON((CH₂)ₙCH₃)₂, where n and m are from 1 to about 10. Other suitable polynucleotides comprise a sugar substituent group selected from: C₁ to C₁₀ lower alkyl, substituted lower alkyl, alkenyl, alkynyl, alkaryl, aralkyl, O-alkaryl or O-aralkyl, SH, SCH₃, OCN, Cl, Br, CN, CF₃, OCF₃, SOCH₃, SO₂CH₃, ONO₂, NO₂, N₃, NH₂, heterocycloalkyl, heterocycloalkaryl, aminoalkylamino, polyalkylamino, substituted silyl, an RNA cleaving group, a reporter group, an intercalator, a group for improving the pharmacokinetic properties of an oligonucleotide, or a group for improving the pharmacodynamic properties of an oligonucleotide, and other substituents having similar properties. A suitable modification includes 2′-methoxyethoxy (2′-O—CH₂CH₂OCH₃, also known as 2′-O-(2-methoxyethyl) or 2′-MOE) (Martin et al., Helv. Chim. Acta, 1995, 78, 486-504) i.e., an alkoxyalkoxy group. A further suitable modification includes 2′-dimethylaminooxyethoxy, i.e., a O(CH₂)₂ON(CH₃)₂ group, also known as 2′-DMAOE, as described in examples herein below, and 2′-dimethylaminoethoxyethoxy (also known in the art as 2′-O-dimethyl-amino-ethoxy-ethyl or 2′-DMAEOE), i.e., 2′-O—CH₂—O—CH₂—N(CH₃)₂.

[0237] Other suitable sugar substituent groups include methoxy (—O—CH₃), aminopropoxy (—OCH₂CH₂CH₂NH₂), allyl (—CH₂—CH═CH₂), —O-allyl (—O—CH₂—CH═CH₂) and fluoro (F). 2′-sugar substituent groups may be in the arabino (up) position or ribo (down) position. A suitable 2′-arabino modification is 2′-F. Similar modifications may also be made at other positions on the oligomeric compound, particularly the 3′ position of the sugar on the 3′ terminal nucleoside or in 2′-5′ linked oligonucleotides and the 5′ position of 5′ terminal nucleotide. Oligomeric compounds may also have sugar mimetics such as cyclobutyl moieties in place of the pentofuranosyl sugar.

### Base Modifications and Substitutions

[0238] A nucleic acid may also include nucleobase (often referred to in the art simply as “base”) modifications or substitutions. As used herein, “unmodified” or “natural” nucleobases include the purine bases adenine (A) and guanine (G), and the pyrimidine bases thymine (T), cytosine (C) and uracil (U). Modified nucleobases include other synthetic and natural nucleobases such as 5-methylcytosine (5-me-C), 5-hydroxymethyl cytosine, xanthine, hypoxanthine, 2-aminoadenine, 6-methyl and other alkyl derivatives of adenine and guanine, 2-propyl and other alkyl derivatives of adenine and guanine, 2-thiouracil, 2-thiothymine and 2-thiocytosine, 5-halouracil and cytosine, 5-propynyl (—C═C—CH₃) uracil and cytosine and other alkynyl derivatives of pyrimidine bases, 6-azo uracil, cytosine and thymine, 5-uracil (pseudouracil), 4-thiouracil, 8-halo, 8-amino, 8-thiol, 8-thioalkyl, 8-hydroxyl and other 8-substituted adenines and guanines, 5-halo particularly 5-bromo, 5-trifluoromethyl and other 5-substituted uracils and cytosines, 7-methylguanine and 7-methyladenine, 2-F-adenine, 2-amino-adenine, 8-azaguanine and 8-azaadenine, 7-deazaguanine and 7-deazaadenine and 3-deazaguanine and 3-deazaadenine. Further modified nucleobases include tricyclic pyrimidines such as phenoxazine cytidine (1H-pyrimido(5,4-b)(1,4)benzoxazin-2(3H)-one), phenothiazine cytidine (1H-pyrimido(5,4-b)(1,4)benzothiazin-2(3H)-one), G-clamps such as a substituted phenoxazine cytidine (e.g. 9-(2-aminoethoxy)-H-pyrimido(5,4-(b)(1,4)benzoxazin-2(3H)-one), carbazole cytidine (2H-pyrimido(4,5-b)indol-2-one), pyridoindole cytidine (H-pyrido(3′,2′:4,5)pyrrolo(2,3-d)pyrimidin-2-one).

[0239] Heterocyclic base moieties may also include those in which the purine or pyrimidine base is replaced with other heterocycles, for example 7-deaza-adenine, 7-deazaguanosine, 2-aminopyridine and 2-pyridone. Further nucleobases include those disclosed in U.S. Pat. No. 3,687,808, those disclosed in The Concise Encyclopedia Of Polymer Science And Engineering, pages 858-859, Kroschwitz, J. I., ed. John Wiley & Sons, 1990, those disclosed by Englisch et al., Angewandte Chemie, International Edition, 1991, 30, 613, and those disclosed by Sanghvi, Y. S., Chapter 15, Antisense Research and Applications, pages 289-302, Crooke, S. T. and Lebleu, B., ed., CRC Press, 1993. Certain of these nucleobases are useful for increasing the binding affinity of an oligomeric compound. These include 5-substituted pyrimidines, 6-azapyrimidines and N-2, N-6 and O-6 substituted purines, including 2-aminopropyladenine, 5-propynyluracil and 5-propynylcytosine. 5-methylcytosine substitutions have been shown to increase nucleic acid duplex stability by 0.6-1.2° C. (Sanghvi et al., eds., Antisense Research and Applications, CRC Press, Boca Raton, 1993, pp. 276-278) and are suitable base substitutions, e.g., when combined with 2′-O-methoxyethyl sugar modifications.

### Error-Prone DNA Polymerases

[0240] A number of error-prone DNA polymerases are known in the art, and any known error-prone DNA polymerase is suitable for use in a fusion polypeptide of the present disclosure. A suitable error-prone DNA polymerase possesses nick translating activity.

[0241] Suitable error-prone DNA polymerases include, but are not limited to, Taq polymerase, Thermus flavus DNA polymerase I, Thermus thermophilus HB-8 DNA polymerase I, Thermophilus ruber DNA polymerase I, Thermophilus brokianus DNA polymerase I, Thermophilus caldophilus GK14 DNA polymerase I, Thermophilus filoformis DNA polymerase I, Bacillus stearothermophilus DNA polymerase I, Bacillus caldotonex YT-G DNA polymerase I, and Bacillus caldovelox YT-F DNA polymerase I. Suitable error-prone DNA polymerases include, but are not limited to, a Niastella koreensis error-prone DNA polymerase, a Mucilaginibacter paludis error-prone DNA polymerase, a Methylobacterium extorquens error-prone DNA polymerase, and a Stenotrophomonas maltophilia error-prone DNA polymerase.

[0242] In some cases, a suitable error-prone DNA polymerase is Escherichia coli DNA polymerase I, with three fidelity-reducing mutations; this error-prone DNA polymerase is referred to as PolI3M. PolI3M comprises D424A, I709N, and A759R substitutions relative to wild-type E. coli DNA polymerase I. In some cases, a suitable error-prone DNA polymerase comprises an amino acid sequence having at least 85%, at least 90%, at least 95%, at least 98%, at least 99%, or 100%, amino acid sequence identity to the DNA polymerase I amino acid sequence depicted in FIG. 8; where the DNA polymerase has an Ala at amino acid position 424, an Asn at amino acid position 709, and an Arg at amino acid position 759 of the amino acid sequence depicted in FIG. 8, or a corresponding amino acid in another DNA polymerase.

[0243] In some cases, a suitable error-prone DNA polymerase is Escherichia coli DNA polymerase I, with five fidelity-reducing mutations: D242A, I709N, A759R, F742Y, and P796H. In some cases, a suitable error-prone DNA polymerase comprises an amino acid sequence having at least 85%, at least 90%, at least 95%, at least 98%, at least 99%, or 100%, amino acid sequence identity to the DNA polymerase I amino acid sequence depicted in FIG. 8; where the DNA polymerase has an Ala at amino acid position 242, an Asn at amino acid position 709, an Arg at amino acid position 759, a Tyr at amino acid position 742, and a His at amino acid position 796; or corresponding amino acids in another DNA polymerase.

[0244] In some cases, a suitable error-prone DNA polymerase comprises an amino acid sequence having at least 85%, at least 90%, at least 95%, at least 98%, or at least 99%, amino acid sequence identity to the DNA polymerase I amino acid sequence depicted in FIG. 8; where the DNA polymerase has an Ala at amino acid position 424, and an Asn at amino acid position 709.

[0245] In some cases, a suitable error-prone DNA polymerase comprises an amino acid sequence having at least 85%, at least 90%, at least 95%, at least 98%, at least 99%, or 100%, amino acid sequence identity to the DNA polymerase I amino acid sequence depicted in FIG. 9.

[0246] In some cases, a suitable error-prone DNA polymerase comprises an amino acid sequence having at least 85%, at least 90%, at least 95%, at least 98%, at least 99%, or 100%, amino acid sequence identity to the DNA polymerase I amino acid sequence depicted in FIG. 10.

[0247] In some cases, a suitable error-prone DNA polymerase comprises an amino acid sequence having at least 85%, at least 90%, at least 95%, at least 98%, at least 99%, or 100%, amino acid sequence identity to the DNA polymerase I amino acid sequence depicted in FIG. 11.

[0248] In some cases, a suitable error-prone DNA polymerase comprises an amino acid sequence having at least 85%, at least 90%, at least 95%, at least 98%, at least 99%, or 100%, amino acid sequence identity to the DNA polymerase iota amino acid sequence depicted in FIG. 13.

[0249] In some cases, a suitable error-prone DNA polymerase comprises an amino acid sequence having at least 85%, at least 90%, at least 95%, at least 98%, at least 99%, or 100%, amino acid sequence identity to the DNA polymerase η amino acid sequence depicted in FIGS. 14A-14B.

[0250] In some cases, a suitable error-prone DNA polymerase comprises an amino acid sequence having at least 85%, at least 90%, at least 95%, at least 98%, at least 99%, or 100%, amino acid sequence identity to the DNA polymerase κ amino acid sequence depicted in FIGS. 15A-15B.

[0251] In some cases, a suitable error-prone DNA polymerase comprises an amino acid sequence having at least 85%, at least 90%, at least 95%, at least 98%, at least 99%, or 100%, amino acid sequence identity to the DNA polymerase θ amino acid sequence depicted in FIGS. 16A-16D.

[0252] In some cases, a suitable error-prone DNA polymerase comprises an amino acid sequence having at least 85%, at least 90%, at least 95%, at least 98%, at least 99%, or 100%, amino acid sequence identity to the DNA polymerase ν (nu) amino acid sequence depicted in FIGS. 17A-17B.

[0253] In some cases, a suitable error-prone DNA polymerase comprises an amino acid sequence having at least 85%, at least 90%, at least 95%, at least 98%, at least 99%, or 100%, amino acid sequence identity to the E. coli DNA polymerase IV amino acid sequence depicted in FIG. 18.

[0254] In some cases, a suitable error-prone DNA polymerase comprises an amino acid sequence having at least 85%, at least 90%, at least 95%, at least 98%, at least 99%, or 100%, amino acid sequence identity to a DNA polymerase β having the following amino acid sequence:

(SEQ ID NO: 1163)
MSKRKAPQETLNGGITDMLTELANFEKNVSQAIHKYNAYRKAASVIAKYPH
KIKSGAEAKKLPGVGTKIAEKIDEFLATGKLRKLEKIRQDDTSSSINFLTR
VSGIGPSAARKFVDEGIKTLEDLRKNEDKLNHHQRIGLKYFGDFEKRIPRE
EMLQMQDIVLNEVKKVDSEYIATVCGSFRRGAESSGDMDVLLTHPSFTSES
TKQPKLLHQVVEQLQKVHFITDTLSKGETKFMGVCQLPSKNDEKEYPHRRI
DIRLIPKDQYYCGVLYFTGSDIFNKNMRAHALEKGFTINEYTIRPLGVTGV
AGEPLPVDSEKDIFDYIQWKYREPKDRSE.

[0255] In some cases, a suitable error-prone DNA polymerase comprises an amino acid sequence having at least 85%, at least 90%, at least 95%, at least 98%, at least 99%, or 100%, amino acid sequence identity to a DNA polymerase iota having the following amino acid sequence:

(SEQ ID NO: 1164)
MEKLGVEPEEEGGGDDDEEDAEAWAMELADVGAAASSQGVHDQVLPTPNAS
SRVIVHVDLDCFYAQVEMISNPELKDKPLGVQQKYLVVTCNYEARKLGVKK
LMNVRDAKEKCPQLVLVNGEDLTRYREMSYKVTELLEEFSPVVERLGFDEN
FVDLTEMVEKRLQQLQSDELSAVTVSGHVYNNQSINLLDVLHIRLLVGSQI
AAEMREAMYNQLGLTGCAGVASNKLLAKLVSGVFKPNQQTVLLPESCQHLI
HSLNHIKEIPGIGYKTAKCLEALGINSVRDLQTFSPKILEKELGISVAQRI
QKLSFGEDNSPVILSGPPQSFSEEDSFKKCSSEVEAKNKIEELLASLLNRV
CQDGRKPHTVRLIIRRYSSEKHYGRESRQCPIPSHVIQKLGTGNYDVMTPM
VDILMKLFRNMVNVKMPFHLTLLSVCFCNLKALNTAKKGLIDYYLMPSLST
TSRSGKHSFKMKDTHMEDFPKDKETNRDFLPSGRIESTRTRESPLDTTNFS
KEKDINEFPLCSLPEGVDQEVFKQLPVDIQEEILSGKSREKFQGKGSVSCP
LHASRGVLSFFSKKQMQDIPINPRDHLSSSKQVSSVSPCEPGTSGFNSSSS
SYMSSQKDYSYYLDNRLKDERISQGPKEPQGFHFTNSNPAVSAFHSFPNLQ
SEQLFSRNHTTDSHKQTVATDSHEGLTENREPDSVDEKITFPSDIDPQVFY
ELPEAVQKELLAEWKRAGSDFHIGHK.

In some cases, such a DNA polymerase generates T→G substitutions.

[0256] In some cases, a suitable error-prone DNA polymerase comprises an amino acid sequence having at least 85%, at least 90%, at least 95%, at least 98%, at least 99%, or 100%, amino acid sequence identity to a DNA polymerase iota having the following amino acid sequence (amino acids 1-445 of DNA polymerase iota):

(SEQ ID NO: 1165)
MEKLGVEPEEEGGGDDDEEDAEAWAMELADVGAAASSQGVHDQVLPTPNAS
SRVIVHVDLDCFYAQVEMISNPELKDKPLGVQQKYLVVTCNYEARKLGVKK
LMNVRDAKEKCPQLVLVNGEDLTRYREMSYKVTELLEEFSPVVERLGFDEN
FVDLTEMVEKRLQQLQSDELSAVTVSGHVYNNQSINLLDVLHIRLLVGSQI
AAEMREAMYNQLGLTGCAGVASNKLLAKLVSGVFKPNQQTVLLPESCQHLI
HSLNHIKEIPGIGYKTAKCLEALGINSVRDLQTFSPKILEKELGISVAQRI
QKLSFGEDNSPVILSGPPQSFSEEDSFKKCSSEVEAKNKIEELLASLLNRV
CQDGRKPHTVRLIIRRYSSEKHYGRESRQCPIPSHVIQKLGTGNYDVMTPM
VDILMKLFRNMVNVKMPFHLTLLSVCFCNLKALNTAK;

and having a length of 445 amino acids. In some cases, such a DNA polymerase generates T→G substitutions. In some cases, such a DNA polymerase has a T→G error rate approaching 1.

[0257] In some cases, a suitable error-prone DNA polymerase comprises an amino acid sequence having at least 85%, at least 90%, at least 95%, at least 98%, at least 99%, or 100%, amino acid sequence identity to a DNA polymerase iota having the following amino acid sequence (amino acids 26-445 of DNA polymerase iota):

(SEQ ID NO: 1166)
ELADVGAAASSQGVHDQVLPTPNASSRVIVHVDLDCFYAQVEMISNPELKD
KPLGVQQKYLVVTCNYEARKLGVKKLMNVRDAKEKCPQLVLVNGEDLTRYR
EMSYKVTELLEEFSPVVERLGFDENFVDLTEMVEKRLQQLQSDELSAVTVS
GHVYNNQSINLLDVLHIRLLVGSQIAAEMREAMYNQLGLTGCAGVASNKLL
AKLVSGVFKPNQQTVLLPESCQHLIHSLNHIKEIPGIGYKTAKCLEALGIN
SVRDLQTFSPKILEKELGISVAQRIQKLSFGEDNSPVILSGPPQSFSEEDS
FKKCSSEVEAKNKIEELLASLLNRVCQDGRKPHTVRLIIRRYSSEKHYGRE
SRQCPIPSHVIQKLGTGNYDVMTPMVDILMKLFRNMVNVKMPFHLTLLSVC
FCNLKALNTAK;

and having a length of 419 amino acids. In some cases, such a DNA polymerase generates T→G substitutions. In some cases, such a DNA polymerase has a T→G error rate approaching 1.

[0258] In some cases, a suitable error-prone DNA polymerase comprises an amino acid sequence having at least 85%, at least 90%, at least 95%, at least 98%, at least 99%, or 100%, amino acid sequence identity to a DNA polymerase nu (ν) having the following amino acid sequence:

(SEQ ID NO: 1167)
ENYEALVGFDLCNTPLSSVAQKIMSAMHSGDLVDSKTWGKSTETMEVINKS
SVKYSVQLEDRKTQSPEKKDLKSLRSQTSRGSAKLSPQSFSVRLTDQLSAD
QKQKSISSLTLSSCLIPQYNQEASVLQKKGHKRKHFLMENINNENKGSINL
KRKHITYNNLSEKTSKQMALEEDTDDAEGYLNSGNSGALKKHFCDIRHLDD
WAKSQLIEMLKQAAALVITVMYTDGSTQLGADQTPVSSVRGIVVLVKRQAE
GGHGCPDAPACGPVLEGFVSDDPCIYIQIEHSAIWDQEQEAHQQFARNVLF
QTMKCKCPVICFNAKDFVRIVLQFFGNDGSWKHVADFIGLDPRIAAWLIDP
SDATPSFEDLVEKYCEKSITVKVNSTYGNSSRNIVNQNVRENLKTLYRLTM
DLCSKLKDYGLWQLFRTLELPLIPILAVMESHAIQVNKEEMEKTSALLGAR
LKELEQEAHFVAGERFLITSNNQLREILFGKLKLHLLSQRNSLPRTGLQKY
PSTSEAVLNALRDLHPLPKIILEYRQVHKIKSTFVDGLLACMKKGSISSTW
NQTGTVTGRLSAKHPNIQGISKHPIQITTPKNFKGKEDKILTISPRAMFVS
SKGHTFLAADFSQIELRILTHLSGDPELLKLFQESERDDVFSTLTSQWKDV
PVEQVTHADREQTKKVVYAVVYGAGKERLAACLGVPIQEAAQFLESFLQKY
KKIKDFARAAIAQCHQTGCVVSIMGRRRPLPRIHAHDQQLRAQAERQAVNF
VVQGSAADLCKLAMIHVFTAVAASHTLTARLVAQIHDELLFEVEDPQIPEC
AALVRRTMESLEQVQALELQLQVPLKVSLSAGRSWGHLVPLQEAWGPPPGP
CRTESPSNSLAAPGSPASTQPPPLHFSPSFCL.

In some cases, such a DNA polymerase generates G→T substitutions.

[0259] In some cases, a suitable error-prone DNA polymerase comprises an amino acid sequence having at least 85%, at least 90%, at least 95%, at least 98%, at least 99%, or 100%, amino acid sequence identity to a DNA polymerase eta (η) having the following amino acid sequence:

(SEQ ID NO: 1168)
MATGQDRVVALVDMDCFFVQVEQRQNPHLRNKPCAVVQYKSWKGGGIIAVS
YEARAFGVTRSMWADDAKKLCPDLLLAQVRESRGKANLTKYREASVEVMEI
MSRFAVIERASIDEAYVDLTSAVQERLQKLQGQPISADLLPSTYIEGLPQG
PTTAEETVQKEGMRKQGLFQWLDSLQIDNLTSPDLQLTVGAVIVEEMRAAI
ERETGFQCSAGISHNKVLAKLACGLNKPNRQTLVSHGSVPQLFSQMPIRKI
RSLGGKLGASVIEILGIEYMGELTQFTESQLQSHFGEKNGSWLYAMCRGIE
HDPVKPRQLPKTIGCSKNFPGKTALATREQVQWWLLQLAQELEERLTKDRN
DNDRVATQLVVSIRVQGDKRLSSLRRCCALTRYDAHKMSHDAFTVIKNCNT
SGIQTEWSPPLTMLFLCATKFSASAPSSSTDITSFLSSDPSSLPKVPVTSS
EAKTQGSGPAVTATKKATTSLESFFQKAAERQKVKEASLSSLTAPTQAPMS
NSPSKPSLPFQTSQSTGTEPFFKQKSLLLKQKQLNNSSVSSPQQNPWSNCK
ALPNSLPTEYPGCVPVCEGVSKLEESSKATPAEMDLAHNSQSMHASSASKS
VLEVTQKATPNPSLLAAEDQVPCEKCGSLVPVWDMPEHMDYHFALELQKSF
LQPHSSNPQVVSAVSHQGKRNPKSPLACTNKRPRPEGMQTLESFFKPLTH.

[0260] In some cases, a suitable error-prone DNA polymerase comprises an amino acid sequence having at least 85%, at least 90%, at least 95%, at least 98%, at least 99%, or 100%, amino acid sequence identity to a DNA polymerase eta (η) having the following amino acid sequence:

(SEQ ID NO: 1169)
MATGQDRVVALVDMDCFFVQVEQRQNPHLRNKPCAVVQYKSWKGGGIIAVS
YEARAFGVTRSMWADDAKKLCPDLLLAQVRESRGKANLTKYREASVEVMEI
MSRFAVIERASIDEAYVDLTSAVQERLQKLQGQPISADLLPSTYIEGLPQG
PTTAEETVQKEGMRKQGLFQWLDSLQIDNLTSPDLQLTVGAVIVEEMRAAI
ERETGFQCSAGISHNKVLAKLACGLNKPNRQTLVSHGSVPQLFSQMPIRKI
RSLGGKLGASVIEILGIEYMGELTQFTESQLQSHFGEKNGSWLYAMCRGIE
HDPVKPRQLPKTIGCSKNFPGKTALATREQVQWWLLQLAQELEERLTKDRN
DNDRVATQLVVSIRVQGDKRLSSLRRCCALTRYDAHKMSHDAFTVIKNCNT
SGIQTEWSPPLTMLFLCATKFSASAPSSSTDITSFLSSDPSSLPKVPVTSS
EAKTQGSGPAVTATKKATTSLESFFQKAAERQKVKEASLSSLTAPTQAPMS
N;

and has a length of 511 amino acids.

[0261] In some cases, a suitable error-prone DNA polymerase comprises an amino acid sequence having at least 85%, at least 90%, at least 95%, at least 98%, at least 99%, or 100%, amino acid sequence identity to a DNA polymerase kappa (κ) having the following amino acid sequence:

(SEQ ID NO: 1170)
MDSTKEKCDSYKDDLLLRMGLNDNKAGMEGLDKEKINKIIMEATKGSRFYG
NELKKEKQVNQRIENMMQQKAQITSQQLRKAQLQVDRFAMELEQSRNLSNT
IVHIDMDAFYAAVEMRDNPELKDKPIAVGSMSMLSTSNYHARRFGVRAAMP
GFIAKRLCPQLIIVPPNFDKYRAVSKEVKEILADYDPNFMAMSLDEAYLNI
TKHLEERQNWPEDKRRYFIKMGSSVENDNPGKEVNKLSEHERSISPLLFEE
SPSDVQPPGDPFQVNFEEQNNPQILQNSVVFGTSAQEVVKEIRFRIEQKTT
LTASAGIAPNTMLAKVCSDKNKPNGQYQILPNRQAVMDFIKDLPIRKVSGI
GKVTEKMLKALGIITCTELYQQRALLSLLFSETSWHYFLHISLGLGSTHLT
RDGERKSMSVERTFSEINKAEEQYSLCQELCSELAQDLQKERLKGRTVTIK
LKNVNFEVKTRASTVSSVVSTAEEIFAIAKELLKTEIDADFPHPLRLRLMG
VRISSFPNEEDRKHQQRSIIGFLQAGNQALSATECTLEKTDKDKFVKPLEM
SHKKSFFDKKRSERKWSHQDTFKCEAVNKQSFQTSQPFQVLKKKMNENLEI
SENSDDCQILTCPVCFRAQGCISLEALNKHVDECLDGPSISENFKMFSCSH
VSATKVNKKENVPASSLCEKQDYEAHPKIKEISSVDCIALVDTIDNSSKAE
SIDALSNKHSKEECSSLPSKSFNIEHCHQNSSSTVSLENEDVGSFRQEYRQ
PYLCEVKTGQALVCPVCNVEQKTSDLTLFNVHVDVCLNKSFIQELRKDKFN
PVNQPKESSRSTGSSSGVQKAVTRTKRPGLMTKYSTSKKIKPNNPKHTLDI
FFK.

[0262] In some cases, a suitable error-prone DNA polymerase comprises an amino acid sequence having at least 85%, at least 90%, at least 95%, at least 98%, at least 99%, or 100%, amino acid sequence identity to a DNA polymerase kappa (κ) having the following amino acid sequence:

(SEQ ID NO: 1171)
MDSTKEKCDSYKDDLLLRMGLNDNKAGMEGLDKEKINKIIMEATKGSRFYG
NELKKEKQVNQRIENMMQQKAQITSQQLRKAQLQVDRFAMELEQSRNLSNT
IVHIDMDAFYAAVEMRDNPELKDKPIAVGSMSMLSTSNYHARRFGVRAAMP
GFIAKRLCPQLIIVPPNFDKYRAVSKEVKEILADYDPNFMAMSLDEAYLNI
TKHLEERQNWPEDKRRYFIKMGSSVENDNPGKEVNKLSEHERSISPLLFEE
SPSDVQPPGDPFQVNFEEQNNPQILQNSVVFGTSAQEVVKEIRFRIEQKTT
LTASAGIAPNTMLAKVCSDKNKPNGQYQILPNRQAVMDFIKDLPIRKVSGI
GKVTEKMLKALGIITCTELYQQRALLSLLFSETSWHYFLHISLGLGSTHLT
RDGERKSMSVERTFSEINKAEEQYSLCQELCSELAQDLQKERLKGRTVTIK
LKNVNFEVKTRASTVSSVVSTAEEIFAIAKELLKTEIDADFPHPLRLRLMG
VRISSFPNEEDRKHQQRSIIGFLQAGNQALSATECTLEKTDKDKFVKPLE;

and has a length of 560 amino acids.

### Linkers

[0263] In some cases, a fusion polypeptide of the present disclosure comprises a linker positioned between the DNA polymerase and the RNA-guided endonuclease.

[0264] In some embodiments, a subject fusion polypeptide can be fused to a fusion partner via a linker polypeptide (e.g., one or more linker polypeptides). The linker polypeptide may have any of a variety of amino acid sequences. Proteins can be joined by a spacer peptide, generally of a flexible nature, although other chemical linkages are not excluded. Suitable linkers include polypeptides of between 4 amino acids and 40 amino acids in length, or between 4 amino acids and 25 amino acids in length. These linkers can be produced by using synthetic, linker-encoding oligonucleotides to couple the proteins, or can be encoded by a nucleic acid sequence encoding the fusion protein. Peptide linkers with a degree of flexibility can be used. The linking peptides may have virtually any amino acid sequence, bearing in mind that the preferred linkers will have a sequence that results in a generally flexible peptide. The use of small amino acids, such as glycine and alanine, are of use in creating a flexible peptide. The creation of such sequences is routine to those of skill in the art. A variety of different linkers are commercially available and are considered suitable for use.

[0265] Examples of linker polypeptides include glycine polymers (G)ₙ, glycine-serine polymers (including, for example, (GS)ₙ, (GSGGS)ₙ (SEQ ID NO:1154), (GGSGGS)ₙ (SEQ ID NO:1155), and (GGGS)ₙ (SEQ ID NO:1156), where n is an integer of at least one), glycine-alanine polymers, alanine-serine polymers. Exemplary linkers can comprise amino acid sequences including, but not limited to, GGSG (SEQ ID NO:1157), GGSGG (SEQ ID NO:1158), GSGSG (SEQ ID NO:1159), GSGGG (SEQ ID NO:1160), GGGSG (SEQ ID NO:1161), GSSSG (SEQ ID NO:1162), and the like. The ordinarily skilled artisan will recognize that design of a peptide conjugated to any desired element can include linkers that are all or partially flexible, such that the linker can include a flexible linker as well as one or more portions that confer less flexible structure.

### Additional Polypeptides

[0266] A fusion polypeptide of the present disclosure can comprise one or more additional polypeptides. Suitable additional polypeptides include, but are not limited to, a nuclear localization signal (NLS); a DNA-binding polypeptide that increases the processivity of the DNA polymerase; a tag for ease of tracking and/or purification (e.g., a fluorescent protein, e.g., green fluorescent protein (GFP), yellow fluorescent protein (YFP), red fluorescent protein (RFP), cyan fluorescent protein (CFP), mCherry, tdTomato, and the like; a histidine tag, e.g., a 6×His tag; a hemagglutinin (HA) tag; a FLAG tag; a Myc tag; a flap endonuclease; a DNA ligase; etc.

[0267] In some cases, e.g., in the context of a base editor, the additional polypeptide promotes or provides for efficient ligation of the nick generated by the RNA-guided endonuclease after the polymerase makes a mis-incorporation. For example, in some cases, a fusion polypeptide of the present disclosure comprises a flap endonuclease and/or a DNA ligase.

[0268] A suitable flap endonuclease comprises an amino acid sequence having at least 85%, at least 90%, at least 95%, at least 98%, at least 99%, or 100%, amino acid sequence identity to the FEN1 amino acid sequence depicted in FIG. 20.

[0269] A suitable DNA ligase comprises an amino acid sequence having at least 85%, at least 90%, at least 95%, at least 98%, at least 99%, or 100%, amino acid sequence identity to the T4 DNA ligase amino acid sequence depicted in FIG. 21.

[0270] In some cases, a fusion polypeptide of the present disclosure comprises, in order from N-terminus to C-terminus: a) an error-prone DNA polymerase; b) a flap endonuclease; and c) an enzymatically active RNA-guided endonuclease that introduces a single-stranded break in a target DNA. In some cases, a fusion polypeptide of the present disclosure comprises, in order from N-terminus to C-terminus: a) an error-prone DNA polymerase; b) an enzymatically active RNA-guided endonuclease that introduces a single-stranded break in a target DNA; and c) a DNA ligase.

### Localization Signals

[0271] In some cases, a fusion polypeptide of the present disclosure comprises one or more localization signal peptides. Suitable localization signals (“subcellular localization signals”) include, e.g., a nuclear localization signal (NLS) for targeting to the nucleus; a sequence to keep the fusion protein out of the nucleus, e.g., a nuclear export sequence (NES); a sequence to keep the fusion protein retained in the cytoplasm; a mitochondrial localization signal for targeting to the mitochondria; a chloroplast localization signal for targeting to a chloroplast; an endoplasmic reticulum (ER) retention signal; and ER export signal; and the like. In some cases, a fusion polypeptide does not include a NLS so that the protein is not targeted to the nucleus (which can be advantageous, e.g., when the target nucleic acid is an RNA that is present in the cytosol).

[0272] In some cases, a fusion polypeptide includes (is fused to) a nuclear localization signal (NLS) (e.g., in some cases 2 or more, 3 or more, 4 or more, or 5 or more NLSs). Thus, in some cases, a fusion polypeptide includes one or more NLSs (e.g., 2 or more, 3 or more, 4 or more, or 5 or more NLSs). In some cases, one or more NLSs (2 or more, 3 or more, 4 or more, or 5 or more NLSs) are positioned at or near (e.g., within 50 amino acids of) the N-terminus and/or the C-terminus. In some cases, one or more NLSs (2 or more, 3 or more, 4 or more, or 5 or more NLSs) are positioned at or near (e.g., within 50 amino acids of) the N-terminus. In some cases, one or more NLSs (2 or more, 3 or more, 4 or more, or 5 or more NLSs) are positioned at or near (e.g., within 50 amino acids of) the C-terminus. In some cases, one or more NLSs (3 or more, 4 or more, or 5 or more NLSs) are positioned at or near (e.g., within 50 amino acids of) both the N-terminus and the C-terminus. In some cases, an NLS is positioned at the N-terminus and an NLS is positioned at the C-terminus.

[0273] In some cases, a fusion polypeptide includes (is fused to) between 1 and 10 NLSs (e.g., 1-9, 1-8, 1-7, 1-6, 1-5, 2-10, 2-9, 2-8, 2-7, 2-6, or 2-5 NLSs). In some cases, a fusion polypeptide includes (is fused to) between 2 and 5 NLSs (e.g., 2-4, or 2-3 NLSs).

[0274] Non-limiting examples of NLSs include an NLS sequence derived from: the NLS of the SV40 virus large T-antigen, having the amino acid sequence PKKKRKV (SEQ ID NO:1172); the NLS from nucleoplasmin (e.g., the nucleoplasmin bipartite NLS with the sequence KRPAATKKAGQAKKKK (SEQ ID NO:1173)); the c-myc NLS having the amino acid sequence PAAKRVKLD (SEQ ID NO:1174) or RQRRNELKRSP (SEQ ID NO:1175); the hRNPA1 M9 NLS having the sequence NQSSNFGPMKGGNFGGRSSGPYGGGGQYFAKPRNQGGY (SEQ ID NO:1176); the sequence RMRIZFKNKGKDTAELRRRRVEVSVELRKAKKDEQILKRRNV (SEQ ID NO:1177) of the IBB domain from importin-alpha; the sequences VSRKRPRP (SEQ ID NO:1178) and PPKKARED (SEQ ID NO:1179) of the myoma T protein; the sequence PQPKKKPL (SEQ ID NO:1180) of human p53; the sequence SALIKKKKKMAP (SEQ ID NO:1181) of mouse c-abl IV; the sequences DRLRR (SEQ ID NO:1182) and PKQKKRK (SEQ ID NO:1183) of the influenza virus NS1; the sequence RKLKKKIKKL (SEQ ID NO:1184) of the Hepatitis virus delta antigen; the sequence REKKKFLKRR (SEQ ID NO:1185) of the mouse Mx1 protein; the sequence KRKGDEVDGVDEVAKKKSKK (SEQ ID NO:1186) of the human poly(ADP-ribose) polymerase; and the sequence RKCLQAGMNLEARKTKK (SEQ ID NO:1187) of the steroid hormone receptors (human) glucocorticoid. In some cases, an NLS comprises the amino acid sequence MDSLLMNRRKFLYQFKNVRWAKGRRETYLC (SEQ ID NO:1188). In general, NLS (or multiple NLSs) are of sufficient strength to drive accumulation of the fusion polypeptide in a detectable amount in the nucleus of a eukaryotic cell. Detection of accumulation in the nucleus may be performed by any suitable technique. For example, a detectable marker may be fused to the fusion polypeptide such that location within a cell may be visualized. Cell nuclei may also be isolated from cells, the contents of which may then be analyzed by any suitable process for detecting protein, such as immunohistochemistry, Western blot, or enzyme activity assay. Accumulation in the nucleus may also be determined indirectly.

[0275] In some cases, the NLS is located N-terminal of the RNA-guided endonuclease present in a fusion polypeptide of the present disclosure. In some cases, the NLS is located between the DNA polymerase and the RNA-guided endonuclease present in a fusion polypeptide of the present disclosure. In some cases, the NLS is located N-terminal of the DNA polymerase present in a fusion polypeptide of the present disclosure. In some cases, the NLS is located C-terminal of the DNA polymerase present in a fusion polypeptide of the present disclosure.

[0276] In some cases, a fusion polypeptide includes a “Protein Transduction Domain” or PTD (also known as a CPP—cell penetrating peptide), which refers to a polypeptide, polynucleotide, carbohydrate, or organic or inorganic compound that facilitates traversing a lipid bilayer, micelle, cell membrane, organelle membrane, or vesicle membrane. A PTD attached to another molecule, which can range from a small polar molecule to a large macromolecule and/or a nanoparticle, facilitates the molecule traversing a membrane, for example going from extracellular space to intracellular space, or cytosol to within an organelle. In some embodiments, a PTD is covalently linked to the amino terminus of a polypeptide. In some embodiments, a PTD is covalently linked to the carboxyl terminus of a polypeptide. In some cases, the PTD is inserted internally in the fusion polypeptide (i.e., is not at the N- or C-terminus of the fusion polypeptide) at a suitable insertion site. In some cases, a subject fusion polypeptide includes (is conjugated to, is fused to) one or more PTDs (e.g., two or more, three or more, four or more PTDs). In some cases, a PTD includes a nuclear localization signal (NLS) (e.g., in some cases 2 or more, 3 or more, 4 or more, or 5 or more NLSs). Thus, in some cases, a fusion polypeptide includes one or more NLSs (e.g., 2 or more, 3 or more, 4 or more, or 5 or more NLSs). In some embodiments, a PTD is covalently linked to a nucleic acid (e.g., a guide nucleic acid, a polynucleotide encoding a guide nucleic acid, a polynucleotide encoding a fusion polypeptide, a donor polynucleotide, etc.). Examples of PTDs include but are not limited to a minimal undecapeptide protein transduction domain (corresponding to residues 47-57 of HIV-1 TAT comprising YGRKKRRQRRR; SEQ ID NO:1189); a polyarginine sequence comprising a number of arginines sufficient to direct entry into a cell (e.g., 3, 4, 5, 6, 7, 8, 9, 10, or 10-50 arginines); a VP22 domain (Zender et al. (2002) Cancer Gene Ther. 9(6):489-96); an Drosophila antennapedia protein transduction domain (Noguchi et al. (2003) Diabetes 52(7):1732-1737); a truncated human calcitonin peptide (Trehin et al. (2004) Pharm. Research 21:1248-1256); polylysine (Wender et al. (2000) Proc. Natl. Acad. Sci. USA 97:13003-13008); RRQRRTSKLMKR (SEQ ID NO:1190); Transportan GWTLNSAGYLLGKINLKALAALAKKIL (SEQ ID NO:1191); KALAWEAKLAKALAKALAKHLAKALAKALKCEA (SEQ ID NO:1192); and RQIKIWFQNRRMKWKK (SEQ ID NO:1193). Exemplary PTDs include but are not limited to, YGRKKRRQRRR (SEQ ID NO:1189), RKKRRQRRR (SEQ ID NO:1194); an arginine homopolymer of from 3 arginine residues to 50 arginine residues; Exemplary PTD domain amino acid sequences include, but are not limited to, any of the following: YGRKKRRQRRR (SEQ ID NO:1189); RKKRRQRR (SEQ ID NO:1195); YARAAARQARA (SEQ ID NO:1196); THRLPRRRRRR (SEQ ID NO:1197); and GGRRARRRRRR (SEQ ID NO:1198). In some embodiments, the PTD is an activatable CPP (ACPP) (Aguilera et al. (2009) Integr Biol (Camb) June; 1(5-6): 371-381). ACPPs comprise a polycationic CPP (e.g., Arg9 or “R9”) connected via a cleavable linker to a matching polyanion (e.g., Glu9 or “E9”), which reduces the net charge to nearly zero and thereby inhibits adhesion and uptake into cells. Upon cleavage of the linker, the polyanion is released, locally unmasking the polyarginine and its inherent adhesiveness, thus “activating” the ACPP to traverse the membrane.

DNA-Binding Polypeptides that Increase the Processivity of the DNA Polymerase

[0277] In some cases, a fusion polypeptide of the present disclosure comprises a DNA-binding polypeptide that increases the processivity of the DNA polymerase. Suitable DNA-binding polypeptides that increase the processivity of the DNA polymerase include, but are not limited to, an Sso7d polypeptide, a helix-hairpin-helix domain of topoisomerase I, a thioredoxin binding domain of a T7 DNA polymerase, or a thioredoxin binding domain of a T3 polymerase.

[0278] Suitable Sso7d polypeptides comprise an amino acid sequence having at least 30%, at least 35%, at least 40%, at least 45%, at least 50%, at least 55%, at least 60%, at least 65%, at least 70%, at least 75%, at least 80%, at least 85%, at least 90%, at least 95%, at least 90%, or 100%, amino acid sequence identity to the Sso7d amino acid sequence depicted in FIG. 12.

[0279] Suitable thioredoxin binding domains comprise an amino acid sequence having at least 30%, at least 35%, at least 40%, at least 45%, at least 50%, at least 55%, at least 60%, at least 65%, at least 70%, at least 75%, at least 80%, at least 85%, at least 90%, at least 95%, at least 90%, or 100%, amino acid sequence identity to the following amino acid sequence:

(SEQ ID NO: 1199)
TETFGSWYQPKGGTEMFCHPRTGKPLPKYPRIKTPKVGGIFKKPKNKAQRE
GREPCELDTREYVAGAPYTPVEHV.

### Systems

[0280] The present disclosure provides a system comprising: a) a fusion polypeptide of the present disclosure; and b) a guide RNA that comprises: i) a protein-binding segment comprising a nucleotide sequence that binds to the RNA-guided endonuclease; and ii) a target-binding segment comprising a nucleotide sequence that is complementary to a target nucleotide sequence in a target nucleic acid. Fusion polypeptides of the present disclosure are described above. Suitable guide RNAs are described above. A system of the present disclosure (e.g., a system comprising: a) a fusion protein comprising: i) an enzymatically active RNA-guided endonuclease that introduces a single-stranded break in a target DNA; and ii) an error-prone DNA polymerase; and b) a guide RNA) is also referred to herein as “EvolvR.”

[0281] In some cases, the guide RNA is a single-molecule guide RNA. In some cases, the guide RNA is a dual-molecule guide RNA. In some cases, the guide RNA comprises one or more of: a) a modified base; b) a modified backbone; c) a modified sugar moiety; and d) a non-natural internucleoside linkage. Such modifications are described above.

### Nucleic Acids; Recombinant Expression Vectors

[0282] The present disclosure provides a nucleic acid comprising a nucleotide sequence encoding a fusion polypeptide of the present disclosure.

[0283] In some cases, a nucleic acid comprising a nucleotide sequence encoding a fusion polypeptide of the present disclosure is contained within an expression vector. Thus, the present disclosure provides a recombinant expression vector comprising a nucleic acid comprising a nucleotide sequence encoding a fusion polypeptide of the present disclosure. In some cases, the nucleotide sequence encoding a fusion polypeptide of the present disclosure is operably linked to a transcriptional control element (e.g., a promoter; an enhancer; etc.). In some cases, the transcriptional control element is inducible. In some cases, the transcriptional control element is constitutive. In some cases, the promoters are functional in eukaryotic cells. In some cases, the promoters are cell type-specific promoters. In some cases, the promoters are tissue-specific promoters.

[0284] Depending on the host/vector system utilized, any of a number of suitable transcription and translation control elements, including constitutive and inducible promoters, transcription enhancer elements, transcription terminators, etc. may be used in the expression vector (see e.g., Bitter et al. (1987) Methods in Enzymology, 153:516-544).

[0285] A promoter can be a constitutively active promoter (i.e., a promoter that is constitutively in an active/“ON” state), it may be an inducible promoter (i.e., a promoter whose state, active/“ON” or inactive/“OFF”, is controlled by an external stimulus, e.g., the presence of a particular temperature, compound, or protein), it may be a spatially restricted promoter (i.e., transcriptional control element, enhancer, etc.)(e.g., tissue specific promoter, cell type specific promoter, etc.), and it may be a temporally restricted promoter (i.e., the promoter is in the “ON” state or “OFF” state during specific stages of embryonic development or during specific stages of a biological process).

[0286] Suitable promoter and enhancer elements are known in the art. For expression in a bacterial cell, suitable promoters include, but are not limited to, lacI, lacZ, T3, T7, gpt, lambda P and trc. For expression in a eukaryotic cell, suitable promoters include, but are not limited to, light and/or heavy chain immunoglobulin gene promoter and enhancer elements; cytomegalovirus immediate early promoter; herpes simplex virus thymidine kinase promoter; early and late SV40 promoters; promoter present in long terminal repeats from a retrovirus; mouse metallothionein-I promoter; and various art-known tissue specific promoters.

[0287] Suitable reversible promoters, including reversible inducible promoters are known in the art. Such reversible promoters may be isolated and derived from many organisms, e.g., eukaryotes and prokaryotes. Such reversible promoters, and systems based on such reversible promoters but also comprising additional control proteins, include, but are not limited to, alcohol regulated promoters (e.g., alcohol dehydrogenase I (alcA) gene promoter, promoters responsive to alcohol transactivator proteins (AlcR), etc.), tetracycline regulated promoters, (e.g., promoter systems including TetActivators, TetON, TetOFF, etc.), steroid regulated promoters (e.g., rat glucocorticoid receptor promoter systems, human estrogen receptor promoter systems, retinoid promoter systems, thyroid promoter systems, ecdysone promoter systems, mifepristone promoter systems, etc.), metal regulated promoters (e.g., metallothionein promoter systems, etc.), pathogenesis-related regulated promoters (e.g., salicylic acid regulated promoters, ethylene regulated promoters, benzothiadiazole regulated promoters, etc.), temperature regulated promoters (e.g., heat shock inducible promoters (e.g., HSP-70, HSP-90, soybean heat shock promoter, etc.), light regulated promoters, synthetic inducible promoters, and the like.

[0288] Inducible promoters suitable for use include any inducible promoter described herein or known to one of ordinary skill in the art. Examples of inducible promoters include, without limitation, chemically/biochemically-regulated and physically-regulated promoters such as alcohol-regulated promoters, tetracycline-regulated promoters (e.g., anhydrotetracycline (aTc)-responsive promoters and other tetracycline-responsive promoter systems, which include a tetracycline repressor protein (tetR), a tetracycline operator sequence (tetO) and a tetracycline transactivator fusion protein (tTA)), steroid-regulated promoters (e.g., promoters based on the rat glucocorticoid receptor, human estrogen receptor, moth ecdysone receptors, and promoters from the steroid/retinoid/thyroid receptor superfamily), metal-regulated promoters (e.g., promoters derived from metallothionein (proteins that bind and sequester metal ions) genes from yeast, mouse and human), pathogenesis-regulated promoters (e.g., induced by salicylic acid, ethylene or benzothiadiazole (BTH)), temperature/heat-inducible promoters (e.g., heat shock promoters), and light-regulated promoters (e.g., light responsive promoters from plant cells).

[0289] Examples of constitutive plant promoters include the cauliflower mosaic virus (CaMV) 35S promoter, which confers constitutive, high-level expression in most plant tissues (see, e.g., Odell et al. (1985) Nature 313: 810-812); the nopaline synthase promoter (An et al. (1988) Plant Physiol. 88: 547-552); and the octopine synthase promoter (Fromm et al. (1989) Plant Cell 1: 977-984).

[0290] A variety of plant gene promoters that regulate gene expression in response to environmental, hormonal, chemical, developmental signals, and in a tissue-active manner can be used for expression of a nucleotide sequence (e.g., a nucleotide sequence encoding a fusion polypeptide of the present disclosure) in plants. The choice of a promoter can be determined by such factors as tissue (e.g., seed, fruit, root, pollen, vascular tissue, flower, carpel, etc.), inducibility (e.g., in response to wounding, heat, cold, drought, light, pathogens, etc.), timing, developmental stage, and the like. Numerous known promoters have been characterized and can be employed to promote expression of a polynucleotide of the invention in a transgenic plant or cell of interest. For example, tissue specific promoters include: seed-specific promoters (such as the napin, phaseolin or DC3 promoter described in U.S. Pat. No. 5,773,697), fruit-specific promoters that are active during fruit ripening (such as the dru 1 promoter (U.S. Pat. No. 5,783,393), or the 2A11 promoter (U.S. Pat. No. 4,943,674) and the tomato polygalacturonase promoter (Bird et al. (1988) Plant Mol. Biol. 11: 651-662), root-specific promoters, such as those disclosed in U.S. Pat. Nos. 5,618,988, 5,837,848 and 5,905,186, pollen-active promoters such as PTA29, PTA26 and PTA13 (U.S. Pat. No. 5,792,929), promoters active in vascular tissue (Ringli and Keller (1998) Plant Mol. Biol. 37: 977-988), flower-specific (Kaiser et al. (1995) Plant Mol. Biol. 28: 231-243), pollen (Baerson et al. (1994) Plant Mol. Biol. 26: 1947-1959), carpels (Ohl et al. (1990) Plant Cell 2: 837-848), pollen and ovules (Baerson et al. (1993) Plant Mol. Biol. 22: 255-267), auxin-inducible promoters (such as that described in van der Kop et al. (1999) Plant Mol. Biol. 39: 979-990 or Baumann et al. (1999) Plant Cell 11: 323-334), cytokinin-inducible promoter (Guevara-Garcia (1998) Plant Mol. Biol. 38: 743-753), promoters responsive to gibberellin (Shi et al. (1998) Plant Mol. Biol. 38: 1053-1060, Willmott et al. (1998) 38: 817-825) and the like. Additional promoters are those that elicit expression in response to heat (Ainley et al. (1993) Plant Mol. Biol. 22: 13-23), light (e.g., the pea rbcS-3A promoter, Kuhlemeier et al. (1989) Plant Cell 1: 471-478, and the maize rbcS promoter, Schaffner and Sheen (1991) Plant Cell 3: 997-1012); wounding (e.g., wunI, Siebertz et al. (1989) Plant Cell 1: 961-968); pathogens (such as the PR-1 promoter described in Buchel et al. (1999) Plant Mol. Biol. 40: 387-396, and the PDF1.2 promoter described in Manners et al. (1998) Plant Mol. Biol. 38: 1071-1080), and chemicals such as methyl jasmonate or salicylic acid (Gatz (1997) Annu. Rev. Plant Physiol. Plant Mol. Biol. 48: 89-108). In addition, the timing of the expression can be controlled by using promoters such as those acting at senescence (Gan and Amasino (1995) Science 270: 1986-1988); or late seed development (Odell et al. (1994) Plant Physiol. 106: 447-458).

[0291] In some cases, a nucleic acid comprising a nucleotide sequence encoding a fusion polypeptide of the present disclosure is a recombinant expression vector. In some embodiments, the recombinant expression vector is a viral construct, e.g., a recombinant adeno-associated virus (AAV) construct, a recombinant adenoviral construct, a recombinant lentiviral construct, a recombinant retroviral construct, etc. In some cases, a nucleic acid comprising a nucleotide sequence encoding a fusion polypeptide of the present disclosure is a recombinant lentivirus vector. In some cases, a nucleic acid comprising a nucleotide sequence encoding a fusion polypeptide of the present disclosure is a recombinant AAV vector.

[0292] Suitable expression vectors include, but are not limited to, viral vectors (e.g. viral vectors based on vaccinia virus; poliovirus; adenovirus (see, e.g., Li et al., Invest Opthalmol Vis Sci 35:2543 2549, 1994; Borras et al., Gene Ther 6:515 524, 1999; Li and Davidson, PNAS 92:7700 7704, 1995; Sakamoto et al., Hum Gene Ther 5:1088 1097, 1999; WO 94/12649, WO 93/03769; WO 93/19191; WO 94/28938; WO 95/11984 and WO 95/00655); adeno-associated virus (see, e.g., Ali et al., Hum Gene Ther 9:81 86, 1998, Flannery et al., PNAS 94:6916 6921, 1997; Bennett et al., Invest Opthalmol Vis Sci 38:2857 2863, 1997; Jomary et al., Gene Ther 4:683 690, 1997, Rolling et al., Hum Gene Ther 10:641 648, 1999; Ali et al., Hum Mol Genet 5:591 594, 1996; Srivastava in WO 93/09239, Samulski et al., J. Vir. (1989) 63:3822-3828; Mendelson et al., Virol. (1988) 166:154-165; and Flotte et al., PNAS (1993) 90:10613-10617); SV40; herpes simplex virus; human immunodeficiency virus (see, e.g., Miyoshi et al., PNAS 94:10319 23, 1997; Takahashi et al., J Virol 73:7812 7816, 1999); a retroviral vector (e.g., Murine Leukemia Virus, spleen necrosis virus, and vectors derived from retroviruses such as Rous Sarcoma Virus, Harvey Sarcoma Virus, avian leukosis virus, a lentivirus, human immunodeficiency virus, myeloproliferative sarcoma virus, and mammary tumor virus); and the like. In some cases, the vector is a lentivirus vector. Also suitable are transposon-mediated vectors, such as piggyback and sleeping beauty vectors.

[0293] A number of expression vectors suitable for stable transformation of plant cells or for the establishment of transgenic plants have been described including those described in Weissbach and Weissbach (1989) Methods for Plant Molecular Biology, Academic Press, and Gelvin et al. (1990) Plant Molecular Biology Manual, Kluwer Academic Publishers. Specific examples include those derived from a Ti plasmid of Agrobacterium tumefaciens, as well as those disclosed by Herrera-Estrella et al. (1983) Nature 303: 209, Bevan (1984) Nucleic Acids Res. 12: 8711-8721, Klee (1985) Bio/Technology 3: 637-642, for dicotyledonous plants.

[0294] Alternatively, non-Ti vectors can be used to transfer a nucleic acid into monocotyledonous plants and cells by using free DNA delivery techniques. Such methods can involve, for example, the use of liposomes, electroporation, microprojectile bombardment, silicon carbide whiskers, and viruses. By using these methods transgenic plants such as wheat, rice (Christou (1991) Bio/Technology 9: 957-962) and corn (Gordon-Kamm (1990) Plant Cell 2: 603-618) can be produced. An immature embryo can also be a good target tissue for monocots for direct DNA delivery techniques by using the particle gun (Weeks et al. (1993) Plant Physiol. 102: 1077-1084; Vasil (1993) Bio/Technology 10: 667-674; Wan and Lemeaux (1994) Plant Physiol. 104: 37-48, and for Agrobacterium-mediated DNA transfer (Ishida et al. (1996) Nature Biotechnol. 14: 745-750).

### Cells

[0295] The present disclosure provides a cell comprising a fusion polypeptide of the present disclosure. The present disclosure provides a cell comprising a system of the present disclosure. The present disclosure provides a cell comprising a nucleic acid (e.g., a recombinant expression vector) of the present disclosure.

[0296] Suitable host cells include, e.g. a bacterial cell; an archaeal cell; a cell of a single-cell eukaryotic organism; a plant cell; an algal cell, e.g., Botryococcus braunii, Chlamydomonas reinhardtii, Nannochloropsis gaditana, Chlorella pyrenoidosa, Sargassum patens, C. agardh, and the like; a fungal cell (e.g., a yeast cell); an animal cell; a cell from an invertebrate animal (e.g. fruit fly, cnidarian, echinoderm, nematode, etc.); a cell from a vertebrate animal (e.g., fish, amphibian, reptile, bird, mammal); a cell from a mammal (e.g., a cell from a rodent, a cell from a human, etc.); and the like.

[0297] A suitable host cell can be a stem cell (e.g. an embryonic stem (ES) cell, an induced pluripotent stem (iPS) cell); a germ cell; a somatic cell, e.g. a fibroblast, a hematopoietic cell, a neuron, a muscle cell, a bone cell, a hepatocyte, a pancreatic cell; an in vitro or in vivo embryonic cell of an embryo at any stage, e.g., a 1-cell, 2-cell, 4-cell, 8-cell, etc. stage zebrafish embryo; etc.). Cells may be from established cell lines or they may be primary cells, where “primary cells”, “primary cell lines”, and “primary cultures” are used interchangeably herein to refer to cells and cells cultures that have been derived from a subject and allowed to grow in vitro for a limited number of passages of the culture. For example, primary cultures include cultures that may have been passaged 0 times, 1 time, 2 times, 4 times, 5 times, 10 times, or 15 times, but not enough times go through the crisis stage. Primary cell lines can be maintained for fewer than 10 passages in vitro. Host cells are in some cases unicellular organisms, or are grown in culture.

[0298] If the cells are primary cells, they may be harvest from an organism (e.g., an individual) by any convenient method. For example, leukocytes may be conveniently harvested by apheresis, leukocytapheresis, density gradient separation, etc., while cells from tissues such as skin, muscle, bone marrow, spleen, liver, pancreas, lung, intestine, stomach, etc. are most conveniently harvested by biopsy. An appropriate solution may be used for dispersion or suspension of the harvested cells. Such solution will generally be a balanced salt solution, e.g. normal saline, phosphate-buffered saline (PBS), Hank's balanced salt solution, etc., conveniently supplemented with fetal calf serum or other naturally occurring factors, in conjunction with an acceptable buffer at low concentration, e.g., from 5-25 mM. Convenient buffers include HEPES, phosphate buffers, lactate buffers, etc. The cells may be used immediately, or they may be stored, frozen, for long periods of time, being thawed and capable of being reused. In such cases, the cells can be frozen in 10% dimethyl sulfoxide (DMSO), 50% serum, 40% buffered medium, or some other such solution as is commonly used in the art to preserve cells at such freezing temperatures, and thawed in a manner as commonly known in the art for thawing frozen cultured cells.

[0299] In some cases, a subject genetically modified host cell is in vitro. In some embodiments, a subject genetically modified host cell is in vivo. In some embodiments, a subject genetically modified host cell is a prokaryotic cell or is derived from a prokaryotic cell. In some embodiments, a subject genetically modified host cell is a bacterial cell or is derived from a bacterial cell. In some cases, a subject genetically modified host cell is an archaeal cell or is derived from an archaeal cell. In some embodiments, a subject genetically modified host cell is a eukaryotic cell or is derived from a eukaryotic cell. In some cases, a subject genetically modified host cell is a plant cell or is derived from a plant cell. In some cases, a subject genetically modified host cell is an animal cell or is derived from an animal cell. In some embodiments, a subject genetically modified host cell is an invertebrate cell or is derived from an invertebrate cell. In some cases, a subject genetically modified host cell is a vertebrate cell or is derived from a vertebrate cell. In some cases, a subject genetically modified host cell is a mammalian cell or is derived from a mammalian cell. In some cases, a subject genetically modified host cell is a rodent cell or is derived from a rodent cell. In cases embodiments, a subject genetically modified host cell is a human cell or is derived from a human cell.

[0300] The present disclosure provides a genetically modified plant cell, where the genetically modified plant cell is genetically modified with a nucleic acid (e.g., a recombinant expression vector) comprising a nucleotide sequence encoding a fusion polypeptide of the present disclosure. In some cases, the plant cell is a cell of a monocot (a monocotyledon). In some cases, the plant cell is a cell of a dicot (a dicotyledon). A plant cell can be a cell of the xylem, the phloem, the cambium layer, a leaf, a root, etc.

[0301] Suitable plants include, e.g., soybean, wheat, corn, potato, cotton, rice, oilseed rape, sunflower, alfalfa, clover, sugarcane, turf, banana, blackberry, blueberry, strawberry, raspberry, cantaloupe, carrot, cauliflower, coffee, cucumber, eggplant, grapes, honeydew, lettuce, mango, melon, onion, papaya, peas, peppers, pineapple, pumpkin, spinach, squash, sweet corn, tobacco, tomato, watermelon, mint and other labiates, rosaceous fruits, and vegetable brassicas.

[0302] Plant protoplasts are also suitable for some applications. For example, a nucleic acid is introduced into plant tissues, cultured plant cells or plant protoplasts by standard methods including electroporation (Fromm et al. (1985) Proc. Natl. Acad. Sci. 82: 5824-5828), infection by viral vectors such as cauliflower mosaic virus (CaMV) (Hohn et al. (1982) Molecular Biology of Plant Tumors Academic Press, New York, N.Y., pp. 549-560; U.S. Pat. No. 4,407,956), high velocity ballistic penetration by small particles with the nucleic acid either within the matrix of small beads or particles, or on the surface (Klein et al. (1987) Nature 327: 70-73), use of pollen as vector (WO 85/01856), or use of Agrobacterium tumefaciens or A. rhizogenes carrying a T-DNA plasmid in which a nucleic acid encoding a fusion polypeptide of the present disclosure is cloned. The T-DNA plasmid is transmitted to plant cells upon infection by Agrobacterium tumefaciens, and a portion is stably integrated into the plant genome (Horsch et al. (1984) Science 233: 496-498; Fraley et al. (1983) Proc. Natl. Acad. Sci. 80: 4803-4807).

[0303] The present disclosure further provides progeny of a subject genetically modified cell, where the progeny can comprise the same exogenous nucleic acid or polypeptide as the subject genetically modified cell from which it was derived. The present disclosure further provides a composition comprising a subject genetically modified host cell.

### Methods

[0304] A fusion polypeptide of the present disclosure is useful for introducing mutations into a target region of a target nucleic acid; i.e., in some cases, a fusion polypeptide of the present disclosure functions as a mutator. Thus, the present disclosure provides methods of introducing mutations into a target region of a target nucleic acid. A fusion polypeptide of the present disclosure is useful for correcting a mutation in a target nucleic acid; i.e., in some cases, a fusion polypeptide of the present disclosure functions as a base editor. Thus, the present disclosure provides methods correcting a mutation in a target nucleic acid.

Method of Introducing Mutations into a Target Region of a Target Nucleic Acid

[0305] The present disclosure provides a method of mutagenizing a target nucleic, e.g., introducing mutations into a target nucleic acid. The method comprises contacting the target nucleic acid with a system of the present disclosure (e.g., EvolvR); i.e., the method comprises contacting the target nucleic acid with a complex comprising: a) a fusion polypeptide of the present disclosure; and b) a guide RNA. In some cases, the target nucleic acid is present in a cell; and the method comprises introducing a system of the present disclosure into the cell. In some cases, the cell is a prokaryotic cell. In some cases, the cell is a eukaryotic cell. In some cases, the cell is a plant cell. In some cases, the plant cell is a cell of a dicotyledonous plant. In some cases, the plant cell is a cell of a monocotyledonous plant. In some cases, the cell is in vitro. In some cases, the cell is in vivo.

[0306] A method of the present disclosure finds use in a variety of applications. Non-limiting examples of applications involving use of an EvolvR system of the present disclosure include: a) diversifying antibody-encoding genes; b) diversifying protein-coding nucleotide sequences; c) diversifying regulatory elements; d) optimizing antibody affinity; e) diversifying T cells; f) engineering T-cell activity; g) discovering disease-causing genotypes; h) engineering desirable traits into plants.

[0307] In some cases, contacting a target nucleic acid with a complex comprising: a) a fusion polypeptide of the present disclosure; and b) a guide RNA results in introduction of from 1 mutation to 10³ mutations within a target region of a target nucleic acid. For example, in some cases, contacting a target nucleic acid with a complex comprising: a) a fusion polypeptide of the present disclosure; and b) a guide RNA results in introduction of from 1 mutation to 5 mutations, from 5 mutations to 10 mutations, from 10 mutations to 50 mutations, from 50 mutations to 10² mutations, from 10² mutations to 5×10² mutations, or from to 5×10² mutations to 10³ mutations within a target region of a target nucleic acid. As noted above, in some cases, the target region of a target nucleic acid is from 1 nucleotide (nt) to 10 nucleotides (nt), from 10 nt to 50 nt, from 50 nt to 100 nt, from 100 nt to 500 nt, from 500 nt to 10³ nt, from 10³ nt to 5×10³ nt, or from 5×10³ nt to 10⁴ nt from a nick in a target DNA introduced by the RNA-guided endonuclease.

[0308] Introducing mutations into a target region of a target nucleic acid provides for generation of a plurality of mutants, which can then be selected for a particular desired trait. Alternatively, an undesirable trait can be selected against. A desired trait can be selected for simultaneously with selecting against an undesired trait.

[0309] In some cases, a method of the present disclosure comprises: a) mutagenizing a target nucleic acid, generating a plurality of mutated nucleic acids; and b) applying a selection to the mutated nucleic acids. Applying a selection to the mutated nucleic acids can comprise: i) selecting a mutated nucleic acid(s) that confers a desirable trait (phenotype) on a genetically modified host cell comprising the mutated nucleic acid; or ii) selecting a mutated nucleic acid(s) that confers a desirable trait (phenotype) on a transgenic non-human organism that is genetically modified to comprise the mutated nucleic acid. Selection methods are well known in the art, and any known method can be applied.

[0310] For example, in some cases, a mutated nucleic acid may confer increased drought resistance to a plant; and the mutated nucleic acid is identified by subjecting a plurality of plants (or a plurality of plant seeds), each of which is genetically modified with a single member of the plurality of mutated nucleic acids, to drought conditions, and selecting plants that exhibit increased resistance to the drought conditions. Drought assays can be applied to identify a mutated nucleic acid that confers better plant survival after short-term, severe water deprivation. Ion leakage can be measured in the context of a drought assay.

[0311] As another example, in some cases, a mutated nucleic acid may confer increased resistance of a plant to a pathogen (e.g., a fungus; an insect; etc.); and the mutated nucleic acid is identified by subjecting a plurality of plants (or a plurality of plant seeds), each of which is genetically modified with a single member of the plurality of mutated nucleic acids, to the pathogen, and selecting plants that exhibit increased resistance to the pathogen.

[0312] As another example, in some cases, a mutated nucleic acid may confer increased resistance of a plant to salt stress (e.g., high salt conditions; e.g., high NaCl concentrations); and the mutated nucleic acid is identified by subjecting a plurality of plants (or a plurality of plant seeds), each of which is genetically modified with a single member of the plurality of mutated nucleic acids, to high salt conditions, and selecting plants that exhibit increased resistance to the high salt conditions. Plants differ in their tolerance to NaCl depending on their stage of development; therefore seed germination, seedling vigor, and plant growth responses can be evaluated to determine resistance to high salt conditions.

[0313] As another example, in some cases, a mutated nucleic acid may confer increased resistance of a plant to freezing; and the mutated nucleic acid is identified by subjecting a plurality of plants (or a plurality of plant seeds), each of which is genetically modified with a single member of the plurality of mutated nucleic acids, to low temperature (e.g., freezing) conditions, and selecting plants that exhibit increased resistance to the low temperature conditions.

[0314] As another example, in some cases, a mutated nucleic acid may confer increased ability to germinate under high temperature conditions; and the mutated nucleic acid is identified by subjecting a plurality of plants (or a plurality of plant seeds), each of which is genetically modified with a single member of the plurality of mutated nucleic acids, to high temperature conditions, and selecting plants that exhibit increased resistance to the high temperature conditions. Parameters that can be tested include seed germination, seedling vigor, and plant growth.

[0315] As another example, in some cases, a mutated nucleic acid may confer increased resistance to hyperosmotic stress; and the mutated nucleic acid is identified by subjecting a plurality of plants (or a plurality of plant seeds), each of which is genetically modified with a single member of the plurality of mutated nucleic acids, to hyperosmotic stress conditions, and selecting plants that exhibit increased resistance to the hyperosmotic stress conditions. Plants that are resistant to hyperosmotic stress may be more tolerant to drought or freezing.

[0316] Sugar sensing assays can be conducted to identify mutated nucleic acids that provide for sugar sensing by germinating seeds on high concentrations of sucrose and glucose and looking for degrees of hypocotyl elongation. The germination assay on mannitol controls for responses related to hyperosmotic stress. Sugars are key regulatory molecules that affect diverse processes in higher plants including germination, growth, flowering, senescence, sugar metabolism and photosynthesis. Sucrose is the major transport form of photosynthate and its flux through cells has been shown to affect gene expression and alter storage compound accumulation in seeds (source-sink relationships). Glucose-specific hexose-sensing has also been described in plants and is implicated in cell division and repression of “famine” genes (photosynthetic or glyoxylate cycles).

[0317] Crop productivity is in part limited by its rate of CO₂ fixation by the RuBisCo enzyme. In some cases, all RuBisCo catalytic subunits are simultaneously targeted within cyanobacteria using a system of the present disclosure; growing this microbe under high temperature and/or low CO₂ conditions will enrich for RuBisco variants with improved catalytic efficiency and specificity.

### Base Editor

[0318] In some cases, a system of the present disclosure (a fusion polypeptide of the present disclosure and a guide RNA) is a base editor system that comprises a non-processive DNA polymerase that is biased in which mismatches it generates. Such as system provides for targeted base substitutions.

[0319] In some cases, a base editor system of the present disclosure provides for generation of a G→T substitution. In some cases, a base editor system of the present disclosure provides for generation of a G→C substitution. In some cases, a base editor system of the present disclosure provides for generation of a C→A substitution. In some cases, a base editor system of the present disclosure provides for generation of a C→G substitution. In some cases, a base editor system of the present disclosure provides for generation of an A→T substitution. In some cases, a base editor system of the present disclosure provides for generation of an A→G substitution. In some cases, a base editor system of the present disclosure provides for generation of an A→C substitution. In some cases, a base editor system of the present disclosure provides for generation of a T→A substitution. In some cases, a base editor system of the present disclosure provides for generation of a T→G substitution. In some cases, a base editor system of the present disclosure provides for generation of a T→C substitution. In some cases, a base editor system of the present disclosure provides for generation of a G→A substitution. In some cases, a base editor system of the present disclosure provides for generation of a C→T substitution.

[0320] A base-editor system of the present disclosure provides for generation of targeted substitutions that can reverse pathogenic single nucleotide polymorphisms. A base-editor system of the present disclosure provides for creation of crop plants with new alleles.

[0321] In some cases, the substitution rate is 1 mutation per nucleotide per generation.

[0322] A base editor system of the present disclosure comprises a DNA polymerase such as DNA polymerase beta, DNA polymerase iota, DNA polymerase nu, DNA polymerase eta, or DNA polymerase kappa. Variants of these polymerases that place the wrong nucleotide three times more often across from the template base than the correct complementary base can be used.

[0323] In some cases, a fusion polypeptide of the present disclosure comprises: a) an enzymatically active RNA-guided endonuclease; and b) a DNA polymerase selected from a DNA polymerase-beta, a DNA polymerase-iota, a DNA polymerase nu, a DNA polymerase eta, and a DNA polymerase kappa.

[0324] In some cases, a DNA polymerase beta suitable for inclusion in a fusion polypeptide of the present disclosure comprises an amino acid sequence having at least 85%, at least 90%, at least 95%, at least 98%, at least 99%, or 100%, amino acid sequence identity to a DNA polymerase having the following amino acid sequence:

(SEQ ID NO: 1163)
MSKRKAPQETLNGGITDMLTELANFEKNVSQAIHKYNAYRKAASVIAKYPH
KIKSGAEAKKLPGVGTKIAEKIDEFLATGKLRKLEKIRQDDTSSSINFLTR
VSGIGPSAARKFVDEGIKTLEDLRKNEDKLNHHQRIGLKYFGDFEKRIPRE
EMLQMQDIVLNEVKKVDSEYIATVCGSFRRGAESSGDMDVLLTHPSFTSES
TKQPKLLHQVVEQLQKVHFITDTLSKGETKFMGVCQLPSKNDEKEYPHRRI
DIRLIPKDQYYCGVLYFTGSDIFNKNMRAHALEKGFTINEYTIRPLGVTGV
AGEPLPVDSEKDIFDYIQWKYREPKDRSE.

[0325] In some cases, a DNA polymerase iota suitable for inclusion in a fusion polypeptide of the present disclosure comprises an amino acid sequence having at least 85%, at least 90%, at least 95%, at least 98%, at least 99%, or 100%, amino acid sequence identity to a DNA polymerase iota having the following amino acid sequence:

(SEQ ID NO: 1164)
MEKLGVEPEEEGGGDDDEEDAEAWAMELADVGAAASSQGVHDQVLPTPNAS
SRVIVHVDLDCFYAQVEMISNPELKDKPLGVQQKYLVVTCNYEARKLGVKK
LMNVRDAKEKCPQLVLVNGEDLTRYREMSYKVTELLEEFSPVVERLGFDEN
FVDLTEMVEKRLQQLQSDELSAVTVSGHVYNNQSINLLDVLHIRLLVGSQI
AAEMREAMYNQLGLTGCAGVASNKLLAKLVSGVFKPNQQTVLLPESCQHLI
HSLNHIKEIPGIGYKTAKCLEALGINSVRDLQTFSPKILEKELGISVAQRI
QKLSFGEDNSPVILSGPPQSFSEEDSFKKCSSEVEAKNKIEELLASLLNRV
CQDGRKPHTVRLIIRRYSSEKHYGRESRQCPIPSHVIQKLGTGNYDVMTPM
VDILMKLFRNMVNVKMPFHLTLLSVCFCNLKALNTAKKGLIDYYLMPSLST
TSRSGKHSFKMKDTHMEDFPKDKETNRDFLPSGRIESTRTRESPLDTTNFS
KEKDINEFPLCSLPEGVDQEVFKQLPVDIQEEILSGKSREKFQGKGSVSCP
LHASRGVLSFFSKKQMQDIPINPRDHLSSSKQVSSVSPCEPGTSGFNSSSS
SYMSSQKDYSYYLDNRLKDERISQGPKEPQGFHFTNSNPAVSAFHSFPNLQ
SEQLFSRNHTTDSHKQTVATDSHEGLTENREPDSVDEKITFPSDIDPQVFY
ELPEAVQKELLAEWKRAGSDFHIGHK.

In some cases, such a DNA polymerase generates T→G substitutions.

[0326] In some cases, a DNA polymerase iota suitable for inclusion in a fusion polypeptide of the present disclosure comprises an amino acid sequence having at least 85%, at least 90%, at least 95%, at least 98%, at least 99%, or 100%, amino acid sequence identity to a DNA polymerase iota having the following amino acid sequence (amino acids 1-445 of DNA polymerase iota):

(SEQ ID NO: 1165)
MEKLGVEPEEEGGGDDDEEDAEAWAMELADVGAAASSQGVHDQVLPTPNAS
SRVIVHVDLDCFYAQVEMISNPELKDKPLGVQQKYLVVTCNYEARKLGVKK
LMNVRDAKEKCPQLVLVNGEDLTRYREMSYKVTELLEEFSPVVERLGFDEN
FVDLTEMVEKRLQQLQSDELSAVTVSGHVYNNQSINLLDVLHIRLLVGSQI
AAEMREAMYNQLGLTGCAGVASNKLLAKLVSGVFKPNQQTVLLPESCQHLI
HSLNHIKEIPGIGYKTAKCLEALGINSVRDLQTFSPKILEKELGISVAQRI
QKLSFGEDNSPVILSGPPQSFSEEDSFKKCSSEVEAKNKIEELLASLLNRV
CQDGRKPHTVRLIIRRYSSEKHYGRESRQCPIPSHVIQKLGTGNYDVMTPM
VDILMKLFRNMVNVKMPFHLTLLSVCFCNLKALNTAK;

and having a length of 445 amino acids. In some cases, such a DNA polymerase generates T→G substitutions. In some cases, such a DNA polymerase has a T→G error rate approaching 1.

[0327] In some cases, a DNA polymerase iota suitable for inclusion in a fusion polypeptide of the present disclosure comprises an amino acid sequence having at least 85%, at least 90%, at least 95%, at least 98%, at least 99%, or 100%, amino acid sequence identity to a DNA polymerase iota having the following amino acid sequence (amino acids 26-445 of DNA polymerase iota):

(SEQ ID NO: 1166)
ELADVGAAASSQGVHDQVLPTPNASSRVIVHVDLDCFYAQVEMISNPELKD
KPLGVQQKYLVVTCNYEARKLGVKKLMNVRDAKEKCPQLVLVNGEDLTRYR
EMSYKVTELLEEFSPVVERLGFDENFVDLTEMVEKRLQQLQSDELSAVTVS
GHVYNNQSINLLDVLHIRLLVGSQIAAEMREAMYNQLGLTGCAGVASNKLL
AKLVSGVFKPNQQTVLLPESCQHLIHSLNHIKEIPGIGYKTAKCLEALGIN
SVRDLQTFSPKILEKELGISVAQRIQKLSFGEDNSPVILSGPPQSFSEEDS
FKKCSSEVEAKNKIEELLASLLNRVCQDGRKPHTVRLIIRRYSSEKHYGRE
SRQCPIPSHVIQKLGTGNYDVMTPMVDILMKLFRNMVNVKMPFHLTLLSVC
FCNLKALNTAK;

and having a length of 419 amino acids. In some cases, such a DNA polymerase generates T→G substitutions. In some cases, such a DNA polymerase has a T→G error rate approaching 1.

[0328] In some cases, a DNA polymerase iota suitable for inclusion in a fusion polypeptide of the present disclosure comprises an amino acid sequence having at least 85%, at least 90%, at least 95%, at least 98%, at least 99%, or 100%, amino acid sequence identity to a DNA polymerase nu (ν) having the following amino acid sequence:

(SEQ ID NO: 1167)
ENYEALVGFDLCNTPLSSVAQKIMSAMHSGDLVDSKTWGKSTETMEVINKS
SVKYSVQLEDRKTQSPEKKDLKSLRSQTSRGSAKLSPQSFSVRLTDQLSAD
QKQKSISSLTLSSCLIPQYNQEASVLQKKGHKRKHFLMENINNENKGSINL
KRKHITYNNLSEKTSKQMALEEDTDDAEGYLNSGNSGALKKHFCDIRHLDD
WAKSQLIEMLKQAAALVITVMYTDGSTQLGADQTPVSSVRGIVVLVKRQAE
GGHGCPDAPACGPVLEGFVSDDPCIYIQIEHSAIWDQEQEAHQQFARNVLF
QTMKCKCPVICFNAKDFVRIVLQFFGNDGSWKHVADFIGLDPRIAAWLIDP
SDATPSFEDLVEKYCEKSITVKVNSTYGNSSRNIVNQNVRENLKTLYRLTM
DLCSKLKDYGLWQLFRTLELPLIPILAVMESHAIQVNKEEMEKTSALLGAR
LKELEQEAHFVAGERFLITSNNQLREILFGKLKLHLLSQRNSLPRTGLQKY
PSTSEAVLNALRDLHPLPKIILEYRQVHKIKSTFVDGLLACMKKGSISSTW
NQTGTVTGRLSAKHPNIQGISKHPIQITTPKNFKGKEDKILTISPRAMFVS
SKGHTFLAADFSQIELRILTHLSGDPELLKLFQESERDDVFSTLTSQWKDV
PVEQVTHADREQTKKVVYAVVYGAGKERLAACLGVPIQEAAQFLESFLQKY
KKIKDFARAAIAQCHQTGCVVSIMGRRRPLPRIHAHDQQLRAQAERQAVNF
VVQGSAADLCKLAMIHVFTAVAASHTLTARLVAQIHDELLFEVEDPQIPEC
AALVRRTMESLEQVQALELQLQVPLKVSLSAGRSWGHLVPLQEAWGPPPGP
CRTESPSNSLAAPGSPASTQPPPLHFSPSFCL.

In some cases, such a DNA polymerase generates G→T substitutions.

[0329] In some cases, a DNA polymerase eta suitable for inclusion in a fusion polypeptide of the present disclosure comprises an amino acid sequence having at least 85%, at least 90%, at least 95%, at least 98%, at least 99%, or 100%, amino acid sequence identity to a DNA polymerase eta (η) having the following amino acid sequence:

(SEQ ID NO: 1168)
MATGQDRVVALVDMDCFFVQVEQRQNPHLRNKPCAVVQYKSWKGGGIIAVS
YEARAFGVTRSMWADDAKKLCPDLLLAQVRESRGKANLTKYREASVEVMEI
MSRFAVIERASIDEAYVDLTSAVQERLQKLQGQPISADLLPSTYIEGLPQG
PTTAEETVQKEGMRKQGLFQWLDSLQIDNLTSPDLQLTVGAVIVEEMRAAI
ERETGFQCSAGISHNKVLAKLACGLNKPNRQTLVSHGSVPQLFSQMPIRKI
RSLGGKLGASVIEILGIEYMGELTQFTESQLQSHFGEKNGSWLYAMCRGIE
HDPVKPRQLPKTIGCSKNFPGKTALATREQVQWWLLQLAQELEERLTKDRN
DNDRVATQLVVSIRVQGDKRLSSLRRCCALTRYDAHKMSHDAFTVIKNCNT
SGIQTEWSPPLTMLFLCATKFSASAPSSSTDITSFLSSDPSSLPKVPVTSS
EAKTQGSGPAVTATKKATTSLESFFQKAAERQKVKEASLSSLTAPTQAPMS
NSPSKPSLPFQTSQSTGTEPFFKQKSLLLKQKQLNNSSVSSPQQNPWSNCK
ALPNSLPTEYPGCVPVCEGVSKLEESSKATPAEMDLAHNSQSMHASSASKS
VLEVTQKATPNPSLLAAEDQVPCEKCGSLVPVWDMPEHMDYHFALELQKSF
LQPHSSNPQVVSAVSHQGKRNPKSPLACTNKRPRPEGMQTLESFFKPLTH.

[0330] In some cases, a DNA polymerase eta suitable for inclusion in a fusion polypeptide of the present disclosure comprises an amino acid sequence having at least 85%, at least 90%, at least 95%, at least 98%, at least 99%, or 100%, amino acid sequence identity to a DNA polymerase eta (η) having the following amino acid sequence:

(SEQ ID NO: 1169)
MATGQDRVVALVDMDCFFVQVEQRQNPHLRNKPCAVVQYKSWKGGGIIAVS
YEARAFGVTRSMWADDAKKLCPDLLLAQVRESRGKANLTKYREASVEVMEI
MSRFAVIERASIDEAYVDLTSAVQERLQKLQGQPISADLLPSTYIEGLPQG
PTTAEETVQKEGMRKQGLFQWLDSLQIDNLTSPDLQLTVGAVIVEEMRAAI
ERETGFQCSAGISHNKVLAKLACGLNKPNRQTLVSHGSVPQLFSQMPIRKI
RSLGGKLGASVIEILGIEYMGELTQFTESQLQSHFGEKNGSWLYAMCRGIE
HDPVKPRQLPKTIGCSKNFPGKTALATREQVQWWLLQLAQELEERLTKDRN
DNDRVATQLVVSIRVQGDKRLSSLRRCCALTRYDAHKMSHDAFTVIKNCNT
SGIQTEWSPPLTMLFLCATKFSASAPSSSTDITSFLSSDPSSLPKVPVTSS
EAKTQGSGPAVTATKKATTSLESFFQKAAERQKVKEASLSSLTAPTQAPMS
N;

and has a length of 511 amino acids.

[0331] In some cases, a DNA polymerase kappa suitable for inclusion in a fusion polypeptide of the present disclosure comprises an amino acid sequence having at least 85%, at least 90%, at least 95%, at least 98%, at least 99%, or 100%, amino acid sequence identity to a DNA polymerase kappa (κ) having the following amino acid sequence:

(SEQ ID NO: 1170)
MDSTKEKCDSYKDDLLLRMGLNDNKAGMEGLDKEKINKIIMEATKGSRFYG
NELKKEKQVNQRIENMMQQKAQITSQQLRKAQLQVDRFAMELEQSRNLSNT
IVHIDMDAFYAAVEMRDNPELKDKPIAVGSMSMLSTSNYHARRFGVRAAMP
GFIAKRLCPQLIIVPPNFDKYRAVSKEVKEILADYDPNFMAMSLDEAYLNI
TKHLEERQNWPEDKRRYFIKMGSSVENDNPGKEVNKLSEHERSISPLLFEE
SPSDVQPPGDPFQVNFEEQNNPQILQNSVVFGTSAQEVVKEIRFRIEQKTT
LTASAGIAPNTMLAKVCSDKNKPNGQYQILPNRQAVMDFIKDLPIRKVSGI
GKVTEKMLKALGIITCTELYQQRALLSLLFSETSWHYFLHISLGLGSTHLT
RDGERKSMSVERTFSEINKAEEQYSLCQELCSELAQDLQKERLKGRTVTIK
LKNVNFEVKTRASTVSSVVSTAEEIFAIAKELLKTEIDADFPHPLRLRLMG
VRISSFPNEEDRKHQQRSIIGFLQAGNQALSATECTLEKTDKDKFVKPLEM
SHKKSFFDKKRSERKWSHQDTFKCEAVNKQSFQTSQPFQVLKKKMNENLEI
SENSDDCQILTCPVCFRAQGCISLEALNKHVDECLDGPSISENFKMFSCSH
VSATKVNKKENVPASSLCEKQDYEAHPKIKEISSVDCIALVDTIDNSSKAE
SIDALSNKHSKEECSSLPSKSFNIEHCHQNSSSTVSLENEDVGSFRQEYRQ
PYLCEVKTGQALVCPVCNVEQKTSDLTLFNVHVDVCLNKSFIQELRKDKFN
PVNQPKESSRSTGSSSGVQKAVTRTKRPGLMTKYSTSKKIKPNNPKHTLDI
FFK.

[0332] In some cases, a DNA polymerase kappa suitable for inclusion in a fusion polypeptide of the present disclosure comprises an amino acid sequence having at least 85%, at least 90%, at least 95%, at least 98%, at least 99%, or 100%, amino acid sequence identity to a DNA polymerase kappa (κ) having the following amino acid sequence:

(SEQ ID NO: 1171)
MDSTKEKCDSYKDDLLLRMGLNDNKAGMEGLDKEKINKIIMEATKGSRFYG
NELKKEKQVNQRIENMMQQKAQITSQQLRKAQLQVDRFAMELEQSRNLSNT
IVHIDMDAFYAAVEMRDNPELKDKPIAVGSMSMLSTSNYHARRFGVRAAMP
GFIAKRLCPQLIIVPPNFDKYRAVSKEVKEILADYDPNFMAMSLDEAYLNI
TKHLEERQNWPEDKRRYFIKMGSSVENDNPGKEVNKLSEHERSISPLLFEE
SPSDVQPPGDPFQVNFEEQNNPQILQNSVVFGTSAQEVVKEIRFRIEQKTT
LTASAGIAPNTMLAKVCSDKNKPNGQYQILPNRQAVMDFIKDLPIRKVSGI
GKVTEKMLKALGIITCTELYQQRALLSLLFSETSWHYFLHISLGLGSTHLT
RDGERKSMSVERTFSEINKAEEQYSLCQELCSELAQDLQKERLKGRTVTIK
LKNVNFEVKTRASTVSSVVSTAEEIFAIAKELLKTEIDADFPHPLRLRLMG
VRISSFPNEEDRKHQQRSIIGFLQAGNQALSATECTLEKTDKDKFVKPLE;

and has a length of 560 amino acids.

[0333] In some cases, a base editor system of the present disclosure comprises: a) a fusion polypeptide of the present disclosure (e.g., a fusion polypeptide comprising: i) an enzymatically active RNA-guided endonuclease; and ii) a DNA polymerase selected from a DNA polymerase-beta, a DNA polymerase-iota, a DNA polymerase nu, a DNA polymerase eta, and a DNA polymerase kappa); and b) a guide RNA that comprises a nucleotide sequence that comprises: i) a protein-binding segment comprising a nucleotide sequence that binds to the RNA-guided endonuclease; and ii) a target-binding segment comprising a nucleotide sequence that is complementary to a target nucleotide sequence in a target nucleic acid.

[0334] In some cases, a base editor system of the present disclosure comprises: a) a nucleic acid (e.g., a recombinant expression vector) comprising a nucleotide sequence encoding a fusion polypeptide of the present disclosure (e.g., a fusion polypeptide comprising: i) an enzymatically active RNA-guided endonuclease; and ii) a DNA polymerase selected from a DNA polymerase-beta, a DNA polymerase-iota, a DNA polymerase nu, a DNA polymerase eta, and a DNA polymerase kappa); and b) a guide RNA that comprises a nucleotide sequence that comprises: i) a protein-binding segment comprising a nucleotide sequence that binds to the RNA-guided endonuclease; and ii) a target-binding segment comprising a nucleotide sequence that is complementary to a target nucleotide sequence in a target nucleic acid.

[0335] A fusion polypeptide of the present disclosure is useful for correcting a mutation in a target nucleic acid; i.e., in some cases, a fusion polypeptide of the present disclosure functions as a base editor. Thus, the present disclosure provides methods correcting a mutation in a target nucleic acid.

[0336] In some cases, the target nucleic acid comprises a target nucleotide sequence associated with a disease or disorder. In some cases, the target nucleotide sequence comprises a point mutation associated with a disease or disorder. In some cases, a base editor system of the present disclosure introduces a single nucleotide mutation; i.e., changes a single nucleotide in a target nucleotide sequence.

[0337] In some cases, the disease or disorder is cystic fibrosis; phenylketonuria; epidermolytic hyperkeratosis (EHK); Charcot-Marie-Toot disease type 4J; neuroblastoma (NB); von Willebrand disease (vWD); myotonia congenital; hereditary renal amyloidosis; dilated cardiomyopathy (DCM); hereditary lymphedema; familial Alzheimer's disease; Prion disease; chronic infantile neurologic cutaneous particular syndrome (CINCA); desmin-related myopathy (DRM); or a neoplastic disease associated with a mutant PI3KCA protein, a mutant CTNNB1 protein, a mutant HRAS protein, or a mutant p53 protein.

[0338] A base editor system of the present disclosure is introduced into a cell (in vivo or in vitro), where the cell comprises a target nucleic acid comprising a target nucleotide sequence having a single nucleotide mutation that gives rise to a disease or disorder. For example, a eukaryotic cell comprising a mutation to be corrected, e.g., a cell carrying a point mutation, is contacted with a base editor system of the present disclosure. Suitable cells include mammalian cells, including, e.g., non-human primate cells, human cells, canine cells, feline cells, ungulate cells, etc. Suitable cells include plant cells. Suitable cells include insect cells. Suitable cells include arachnid cells.

[0339] A base editor system of the present disclosure is capable of modifying a specific nucleotide base without generating a significant proportion of indels. An “indel”, as used herein, refers to the insertion or deletion of a nucleotide base within a nucleic acid. Such insertions or deletions can lead to frame shift mutations within a coding region of a gene. In some cases, it is desirable to generate base editors that efficiently substitute a specific nucleotide within a nucleic acid, without generating a large number of insertions or deletions (i.e., indels) in the nucleic acid. In cases, a base editor system of the present disclosure is capable of generating a greater proportion of intended modifications (e.g., nucleotide substitutions) versus indels. In some cases, a base editor system of the present disclosure is capable of generating a ratio of intended point mutations to indels that is greater than 1:1. In some cases, a base editor system of the present disclosure is capable of generating a ratio of intended point mutations to indels that is at least 1.5:1, at least 2:1, at least 2.5:1, at least 3:1, at least 3.5:1, at least 4:1, at least 4.5:1, at least 5:1, at least 5.5:1, at least 6:1, at least 6.5:1, at least 7:1, at least 7.5:1, at least 8:1, at least 10:1, at least 12:1, at least 15:1, at least 20:1, at least 25:1, at least 30:1, at least 40:1, at least 50:1, at least 100:1, at least 200:1, at least 300:1, at least 400:1, at least 500:1, at least 600:1, at least 700:1, at least 800:1, at least 900:1, or at least 1000:1, or more than 1000:1.

### Fusion Polypeptide Comprising a Modifying Enzyme, an RNA-Guided Nickase, and a DNA Polymerase

[0340] The present disclosure provides a fusion polypeptide comprising: a) an RNA-guided enzyme that exhibits nickase activity; b) a modifying enzyme (e.g., a DNA-modifying enzyme or a protein-modifying enzyme); and c) a DNA polymerase. The RNA-guided enzyme that exhibits nickase activity, together with a guide RNA, guides the fusion polypeptide to a target nucleotide sequence in a target nucleic acid (e.g., a genome).

[0341] In some cases, a fusion polypeptide of the present disclosure (e.g., a fusion polypeptide comprising: a) an RNA-guided enzyme that exhibits nickase activity; b) a DNA- or protein-modifying enzyme; and c) a DNA polymerase) is a base editor. Thus, in some cases, a base editor of the present disclosure is a fusion polypeptide comprising: a) an RNA-guided enzyme that exhibits nickase activity; b) a DNA- or protein-modifying enzyme; and c) a DNA polymerase. In some cases, a base editor fusion polypeptide of the present disclosure comprises, in order from N-terminus to C-terminus: a) an RNA-guided enzyme that exhibits nickase activity; b) a DNA- or protein-modifying enzyme; and c) a DNA polymerase. In some cases, a base editor fusion polypeptide of the present disclosure comprises, in order from N-terminus to C-terminus: a) a DNA polymerase; b) an RNA-guided enzyme that exhibits nickase activity; and c) a DNA-modifying enzyme. In some cases, a base editor fusion polypeptide of the present disclosure comprises, in order from N-terminus to C-terminus: a) a DNA- or protein-modifying enzyme; b) an RNA-guided enzyme that exhibits nickase activity; and c) a DNA polymerase. In these embodiments, the DNA polymerase can be a high-fidelity DNA polymerase, or a DNA polymerase that lacks substantial proofreading activity. In some cases, the DNA polymerase comprises a D424A substitution.

[0342] Suitable DNA- and protein-modifying enzymes are known in the art. In some cases, the modifying enzyme is a nucleic acid-modifying enzyme. Examples of suitable nucleic acid-modifying enzymes include DNA editing enzymes; deaminases, such as activation induced deaminase and APOBEC proteins; nucleases; recombinases; glycosylases; methyltransferases; and the like. In other cases, the modifying enzyme is a protein-modifying enzyme. For example, the modifying enzyme may be one that modifies a protein associated with a nucleic acid. Examples of suitable protein-modifying enzymes include histone-modifying enzymes, acetylases, kinases, methyltransferases, ubiquitin ligases, SUMO ligases, demethylases, deacetylases, phosphatases, and the like.

[0343] In some cases, a base editor fusion polypeptide of the present disclosure comprises, in order from N-terminus to C-terminus: a) a deaminase; b) a DNA polymerase; and c) an RNA-guided enzyme that exhibits nickase activity. Suitable deaminases include a cytidine deaminase and an adenosine deaminase. In some cases, a base editor fusion polypeptide of the present disclosure comprises, in order from N-terminus to C-terminus: a) a cytidine deaminase; b) an RNA-guided enzyme that exhibits nickase activity; and c) a DNA polymerase. In some cases, a base editor fusion polypeptide of the present disclosure comprises, in order from N-terminus to C-terminus: a) an adenine deaminase; b) an RNA-guided enzyme that exhibits nickase activity; and c) a DNA polymerase. In these embodiments, the DNA polymerase can be a high-fidelity DNA polymerase, or a DNA polymerase that lacks substantial proofreading activity. In some cases, the DNA polymerase comprises a D424A substitution. In some cases, the fusion polypeptide comprises a linker between the deaminase and the DNA polymerase, between the deaminase and the gene-editing enzyme, or between the gene-editing enzyme and the DNA polymerase.

[0344] In some cases, a deaminase-containing base editor system of the present disclosure provides for generation of a G→T substitution. In some cases, a deaminase-containing base editor system of the present disclosure provides for generation of a G→C substitution. In some cases, a deaminase-containing base editor system of the present disclosure provides for generation of a C→A substitution. In some cases, a deaminase-containing base editor system of the present disclosure provides for generation of a C→G substitution. In some cases, a deaminase-containing base editor system of the present disclosure provides for generation of an A→T substitution. In some cases, a deaminase-containing base editor system of the present disclosure provides for generation of an A→G substitution. In some cases, a deaminase-containing base editor system of the present disclosure provides for generation of an A→C substitution. In some cases, a deaminase-containing base editor system of the present disclosure provides for generation of a T→A substitution. In some cases, a deaminase-containing base editor system of the present disclosure provides for generation of a T→G substitution. In some cases, a deaminase-containing base editor system of the present disclosure provides for generation of a T→C substitution. In some cases, a deaminase-containing base editor system of the present disclosure provides for generation of a G→A substitution. In some cases, a deaminase-containing base editor system of the present disclosure provides for generation of a C→T substitution.

### DNA Polymerase

[0345] A DNA- or protein-modifying enzyme-containing fusion polypeptide of the present disclosure (e.g., a deaminase-containing base editor of the present disclosure) comprises a DNA polymerase that is a high-fidelity DNA polymerase. In some cases, a DNA- or protein-modifying enzyme-containing fusion polypeptide of the present disclosure comprises a DNA polymerase lacks proof-reading activity. In some cases, a DNA- or protein-modifying enzyme-containing fusion polypeptide of the present disclosure comprises a DNA polymerase comprises a D424A substitution that exhibits increase nick translation activity. In some cases, a DNA- or protein-modifying enzyme-containing fusion polypeptide of the present disclosure comprises a DNA polymerase is not an error-prone DNA polymerase.

[0346] Previous base-editors fused a DNA-editing enzyme to a programmable nuclease; such a fusion protein will chemically modify a target nucleotide in such a way that DNA polymerases will incorporate across from the chemically modified nucleotide a nucleotide that is not the same nucleotide type originally at this position. However, these previous base-editors rely on replication or repair machinery to perform this DNA polymerase-mediated new nucleotide insertion. A base editor fusion polypeptide of the present disclosure fuses a nick translating DNA polymerase to a deaminase and an RNA-guided enzyme that provides nickase activity, such that the chemically altered nucleotide will be used as a template for the fused DNA polymerase-mediated nick translation. This removes the dependence on replication and repair to achieve base-editing.

[0347] In some cases, a deaminase-containing base editor of the present disclosure comprises a DNA polymerase lacks proof-reading activity. In some cases, a deaminase-containing base editor of the present disclosure comprises a DNA polymerase comprises a D424A substitution that exhibits increase nick translation activity. In some cases, a deaminase-containing base editor of the present disclosure comprises a DNA polymerase is not an error-prone DNA polymerase.

[0348] In some cases, DNA- or protein-modifying enzyme-containing fusion polypeptide of the present disclosure (e.g., a deaminase-containing base editor of the present disclosure) comprises a DNA polymerase that comprises an amino acid sequence having at least 80%, at least 85%, at least 90%, at least 95%, at least 98%, at least 99%, or 100%, amino acid sequence identity to the following E. coli DNA polymerase I amino acid sequence:

(SEQ ID NO: 1246)
VQIPQNPLILVDGSSYLYRAYHAFPPLTNSAGEPTGAMYGVLNMLRSLIMQ
YKPTHAAVVFDAKGKTFRDELFEHYKSHRPPMPDDLRAQIEPLHAMVKAMG
LPLLAVSGVEADDVIGTLAREAEKAGRPVLISTGDKDMAQLVTPNITLINT
MTNTILGPEEVVNKYGVPPELIIDFLALMGDSSDNIPGVPGVGEKTAQALL
QGLGGLDTLYAEPEKIAGLSFRGAKTMAAKLEQNKEVAYLSYQLATIKTDV
ELELTCEQLEVQQPAAEELLGLFKKYEFKRWTADVEAGKWLQAKGAKPAAK
PQETSVADEAPEVTATVISYDNYVTILDEETLKAWIAKLEKAPVFAFDTET
DSLDNISANLVGLSFAIEPGVAAYIPVAHDYLDAPDQISRERALELLKPLL
EDEKALKVGQNLKYDRGILANYGIELRGIAFDTMLESYILNSVAGRHDMDS
LAERWLKHKTITFEEIAGKGKNQLTFNQIALEEAGRYAAEDADVTLQLHLK
MWPDLQKHKGPLNVFENIEMPLVPVLSRIERNGVKIDPKVLHNHSEELTLR
LAELEKKAHEIAGEEFNLSSTKQLQTILFEKQGIKPLKKTPGGAPSTSEEV
LEELALDYPLPKVILEYRGLAKLKSTYTDKLPLMINPKTGRVHTSYHQAVT
ATGRLSSTDPNLQNIPVRNEEGRRIRQAFIAPEDYVIVSADYSQIELRIMA
HLSRDKGLLTAFAEGKDIHRATAAEVFGLPLETVTSEQRRSAKAINFGLIY
GMSAFGLARQLNIPRKEAQKYMDLYFERYPGVLEYMERTRAQAKEQGYVET
LDGRRLYLPDIKSSNGARRAAAERAAINAPMQGTAADIIKRAMIAVDAWLQ
AEQPRVRMIMQVHDELVFEVHKDDVDAVAKQIHQLMENCTRLDVPLLVEVG
SGENWDQAH.

[0349] In some cases, a DNA- or protein-modifying enzyme-containing fusion polypeptide of the present disclosure (e.g., a deaminase-containing base editor of the present disclosure) comprises a DNA polymerase that comprises an amino acid sequence having at least 80%, at least 85%, at least 90%, at least 95%, at least 98%, at least 99%, or 100%, amino acid sequence identity to the following exonuclease-deficient E. coli DNA polymerase I amino acid sequence:

(SEQ ID NO: 1144)
VQIPQNPLILVDGSSYLYRAYHAFPPLTNSAGEPTGAMYGVLNMLRSLIMQ
YKPTHAAVVFDAKGKTFRDELFEHYKSHRPPMPDDLRAQIEPLHAMVKAMG
LPLLAVSGVEADDVIGTLAREAEKAGRPVLISTGDKDMAQLVTPNITLINT
MTNTILGPEEVVNKYGVPPELIIDFLALMGDSSDNIPGVPGVGEKTAQALL
QGLGGLDTLYAEPEKIAGLSFRGAKTMAAKLEQNKEVAYLSYQLATIKTDV
ELELTCEQLEVQQPAAEELLGLFKKYEFKRWTADVEAGKWLQAKGAKPAAK
PQETSVADEAPEVTATVISYDNYVTILDEETLKAWIAKLEKAPVFAFDTET
DSLDNISANLVGLSFAIEPGVAAYIPVAHDYLDAPDQISRERALELLKPLL
EDEKALKVGQNLKYARGILANYGIELRGIAFDTMLESYILNSVAGRHDMDS
LAERWLKHKTITFEEIAGKGKNQLTFNQIALEEAGRYAAEDADVTLQLHLK
MWPDLQKHKGPLNVFENIEMPLVPVLSRIERNGVKIDPKVLHNHSEELTLR
LAELEKKAHEIAGEEFNLSSTKQLQTILFEKQGIKPLKKTPGGAPSTSEEV
LEELALDYPLPKVILEYRGLAKLKSTYTDKLPLMINPKTGRVHTSYHQAVT
ATGRLSSTDPNLQNIPVRNEEGRRIRQAFIAPEDYVIVSADYSQIELRIMA
HLSRDKGLLTAFAEGKDIHRATAAEVFGLPLETVTSEQRRSAKAINFGLIY
GMSAFGLARQLNIPRKEAQKYMDLYFERYPGVLEYMERTRAQAKEQGYVET
LDGRRLYLPDIKSSNGARRAAAERAAINAPMQGTAADIIKRAMIAVDAWLQ
AEQPRVRMIMQVHDELVFEVHKDDVDAVAKQIHQLMENCTRLDVPLLVEVG
SGENWDQAH

### Modifying Enzymes

[0350] As noted above, suitable DNA- and protein-modifying enzymes are known in the art. In some cases, the modifying enzyme is a nucleic acid-modifying enzyme. Examples of suitable nucleic acid-modifying enzymes include DNA editing enzymes; deaminases, such as activation induced deaminase and APOBEC proteins; nucleases; recombinases; glycosylases; methyltransferases; and the like. In other cases, the modifying enzyme is a protein-modifying enzyme. For example, the modifying enzyme may be one that modifies a protein associated with a nucleic acid. Examples of suitable protein-modifying enzymes include histone-modifying enzymes, acetylases, kinases, methyltransferases, ubiquitin ligases, SUMO ligases, demethylases, deacetylases, phosphatases, and the like.

### Adenosine Deaminases

[0351] Adenosine deaminases suitable for inclusion in a deaminase-containing base editor of the present disclosure include any enzyme that is capable of deaminating adenosine in DNA. In some cases, the deaminase is a TadA deaminase.

[0352] In some cases, a suitable adenosine deaminase comprises an amino acid sequence having at least 80%, at least 85%, at least 90%, at least 95%, at least 98%, at least 99%, or 100%, amino acid sequence identity to the following amino acid sequence:

(SEQ ID NO: 1247)
MSEVEFSHEYWMRHALTLAKRAWDEREVPVGAVLVHNNRVIGEGWNRPIGR
HDPTAHAEIMALRQGGLVMQNYRLIDATLYVTLEPCVMCAGAMIHSRIGRV
VFGARDAKTGAAGSLMDVLHHPGMNHRVEITEGILADECAALLSDFFRMRR
QEIKAQKKAQSSTD

[0353] In some cases, a suitable adenosine deaminase comprises an amino acid sequence having at least 80%, at least 85%, at least 90%, at least 95%, at least 98%, at least 99%, or 100%, amino acid sequence identity to the following amino acid sequence:

(SEQ ID NO: 1248)
MRRAFITGVFFLSEVEFSHEYWMRHALTLAKRAWDEREVPVGAVLVHNNRV
IGEGWNRPIGRHDPTAHAEIMALRQGGLVMQNYRLIDATLYVTLEPCVMCA
GAMIHSRIGRVVFGARDAKTGAAGSLMDVLHHPGMNHRVEITEGILADECA
ALLSDFFRMRRQEIKAQKKAQSSTD.

[0354] In some cases, a suitable adenosine deaminase comprises an amino acid sequence having at least 80%, at least 85%, at least 90%, at least 95%, at least 98%, at least 99%, or 100%, amino acid sequence identity to the following Staphylococcus aureus TadA amino acid sequence:

(SEQ ID NO: 1200)
MGSHMTNDIYFMTLAIEEAKKAAQLGEVPIGAIITKDDEVIARAHNLRETL
QQPTAHAEHIAIERAAKVLGSWRLEGCTLYVTLEPCVMCAGTIVMSRIPRV
VYGADDPKGGCSGSLMNLLQQSNFNHRAIVDKGVLKEACSTLLTTFFK NL
RANKKSTN:

[0355] In some cases, a suitable adenosine deaminase comprises an amino acid sequence having at least 80%, at least 85%, at least 90%, at least 95%, at least 98%, at least 99%, or 100%, amino acid sequence identity to the following Bacillus subtilis TadA amino acid sequence:

(SEQ ID NO: 1201)
MTQDELYMKEAIKEAKKAEEKGEVPIGAVLVINGEIIARAHNLRETEQRSI
AHAEMLVIDEACKALGTWRLEGATLYVTLEPCPMCAGAVVLSRVEKVVFGA
FDPKGGCSGTLMNLLQEERFNHQAEVVSGVLEEECGGMLSAFFRELRKKKK
AARKNLSE

[0356] In some cases, a suitable adenosine deaminase comprises an amino acid sequence having at least 80%, at least 85%, at least 90%, at least 95%, at least 98%, at least 99%, or 100%, amino acid sequence identity to the following Salmonella typhimurium TadA:

(SEQ ID NO: 1202)
MPPAFITGVTSLSDVELDHEYWMRHALTLAKRAWDEREVPVGAVLVHNHRV
IGEGWNRPIGRHDPTAHAEIMALRQGGLVLQNYRLLDTTLYVTLEPCVMCA
GAMVHSRIGRVVFGARDAKTGAAGSLIDVLHHPGMNHRVEIIEGVLRDECA
TLLSDFFRMRRQEIKALKKADRAEGAGPAV

[0357] In some cases, a suitable adenosine deaminase comprises an amino acid sequence having at least 80%, at least 85%, at least 90%, at least 95%, at least 98%, at least 99%, or 100%, amino acid sequence identity to the following Shewanella putrefaciens TadA amino acid sequence:

(SEQ ID NO: 1203)
MDEYWMQVAMQMAEKAEAAGEVPVGAVLVKDGQQIATGYNLSISQHDPTAH
AEILCLRSAGKKLENYRLLDATLYITLEPCAMCAGAMVHSRIARVVYGARD
EKTGAAGTVVNLLQHPAFNHQVEVTSGVLAEACSAQLSRFFKRRRDEKKAL
KLAQRAQQGIE

[0358] In some cases, a suitable adenosine deaminase comprises an amino acid sequence having at least 80%, at least 85%, at least 90%, at least 95%, at least 98%, at least 99%, or 100%, amino acid sequence identity to the following Haemophilus influenzae F3031 TadA amino acid sequence:

(SEQ ID NO: 1204)
MDAAKVRSEFDEKMMRYALELADKAEALGEIPVGAVLVDDARNIIGEGWNL
SIVQSDPTAHAEIIALRNGAKNIQNYRLLNSTLYVTLEPCTMCAGAILHSR
IKRLVFGASDYKTGAIGSRFHFFDDYKMNHTLEITSGVLAEECSQKLS TF
FQKRREEKKIEKALLKSLSDK

[0359] In some cases, a suitable adenosine deaminase comprises an amino acid sequence having at least 80%, at least 85%, at least 90%, at least 95%, at least 98%, at least 99%, or 100%, amino acid sequence identity to the following Caulobacter crescentus TadA amino acid sequence:

(SEQ ID NO: 1205)
MRTDESEDQDHRMMRLALDAARAAAEAGETPVGAVILDPSTGEVIATAGNG
PIAAHDPTAHAEIAAMRAAAAKLGNYRLTDLTLVVTLEPCAMCAGAISHAR
IGRVVFGADDPKGGAVVHGPKFFAQPTCHWRPEVTGGVLADESADLLRGFF
RARRKAKI

[0360] In some cases, a suitable adenosine deaminase comprises an amino acid sequence having at least 80%, at least 85%, at least 90%, at least 95%, at least 98%, at least 99%, or 100%, amino acid sequence identity to the following Geobacter sulfurreducens TadA amino acid sequence:

(SEQ ID NO: 1206)
MSSLKKTPIRDDAYWMGKAIREAAKAAARDEVPIGAVIVRDGAVIGRGHNL
REGSNDPSAHAEMIAIRQAARRSANWRLTGATLYVTLEPCLMCMGAIILAR
LERVVFGCYDPKGGAAGSLYDLSADPRLNHQVRLSPGVCQEECGTMLSDFF
RDLRRRKKAKATPALFIDERKVPPEP

### Cytidine Deaminases

[0361] Cytidine deaminases suitable for inclusion in a deaminase-containing base editor of the present disclosure include any enzyme that is capable of deaminating cytidine in DNA.

[0362] In some cases, the cytidine deaminase is a deaminase from the apolipoprotein B mRNA-editing complex (APOBEC) family of deaminases. In some cases, the APOBEC family deaminase is selected from the group consisting of APOBEC1 deaminase, APOBEC2 deaminase, APOBEC3A deaminase, APOBEC3B deaminase, APOBEC3C deaminase, APOBEC3D deaminase, APOBEC3F deaminase, APOBEC3G deaminase, and APOBEC3H deaminase. In some cases, the cytidine deaminase is an activation induced deaminase (AID).

[0363] In some cases, a suitable cytidine deaminase comprises an amino acid sequence having at least 80%, at least 85%, at least 90%, at least 95%, at least 98%, at least 99%, or 100%, amino acid sequence identity to the following amino acid sequence:

(SEQ ID NO: 1207)
[sequence omitted]

[0364] In some cases, a suitable cytidine deaminase is an AID and comprises an amino acid sequence having at least 80%, at least 85%, at least 90%, at least 95%, at least 98%, at least 99%, or 100%, amino acid sequence identity to the following amino acid sequence:

(SEQ ID NO: 1208)
MDSLLMNRRK FLYQFKNVRW AKGRRETYLC YVVKRRDSAT
SFSLDFGYLR NKNGCHVELL FLRYISDWDL DPGRCYRVTW
FTSWSPCYDC ARHVADFLRG NPNLSLRIFT ARLYFCEDRK
AEPEGLRRLH RAGVQIAIMT FKENHERTFK AWEGLHENSV
RLSRQLRRIL LPLYEVDDLR DAFRTLGL.

[0365] In some cases, a suitable cytidine deaminase is an AID and comprises an amino acid sequence having at least 80%, at least 85%, at least 90%, at least 95%, at least 98%, at least 99%, or 100%, amino acid sequence identity to the following amino acid sequence:

(SEQ ID NO: 1209)
[sequence omitted]

### RNA-Guided Enzyme Exhibiting Nickase Activity

[0366] As noted above, a DNA- or protein-modifying enzyme-containing fusion polypeptide of the present disclosure (e.g., a deaminase-containing base editor of the present disclosure) comprises an RNA-guided enzyme that exhibits nickase activity. Suitable nickases are described elsewhere herein.

[0367] In some cases, a suitable RNA-guided enzyme that exhibits nickase activity comprises an amino acid sequence having at least 80%, at least 85%, at least 90%, at least 95%, at least 98%, at least 99%, or 100%, amino acid sequence identity to the following “nicking high fidelity” Cas9 amino acid sequence:

(SEQ ID NO: 1210)
DKKYSIGLAIGTNSVGWAVITDEYKVPSKKFKVLGNTDRHSIKKNLIGALL
FDSGETAEATRLKRTARRRYTRRKNRICYLQEIFSNEMAKVDDSFFHRLEE
SFLVEEDKKHERHPIFGNIVDEVAYHEKYPTIYHLRKKLVDSTDKADLRLI
YLALAHMIKFRGHFLIEGDLNPDNSDVDKLFIQLVQTYNQLFEENPINASG
VDAKAILSARLSKSRRLENLIAQLPGEKKNGLFGNLIALSLGLTPNFKSNF
DLAEDAKLQLSKDTYDDDLDNLLAQIGDQYADLFLAAKNLSDAILLSDILR
VNTEITKAPLSASMIKRYDEHHQDLTLLKALVRQQLPEKYKEIFFDQSKNG
YAGYIDGGASQEEFYKFIKPILEKMDGTEELLVKLNREDLLRKQRTFDNGS
IPHQIHLGELHAILRRQEDFYPFLKDNREKIEKILTFRIPYYVGPLARGNS
RFAWMTRKSEETITPWNFEEVVDKGASAQSFIERMTAFDKNLPNEKVLPKH
SLLYEYFTVYNELTKVKYVTEGMRKPAFLSGEQKKAIVDLLFKTNRKVTVK
QLKEDYFKKIECFDSVEISGVEDRFNASLGTYHDLLKIIKDKDFLDNEENE
DILEDIVLTLTLFEDREMIEERLKTYAHLFDDKVMKQLKRRRYTGWGALSR
KLINGIRDKQSGKTILDFLKSDGFANRNFMALIHDDSLTFKEDIQKAQVSG
QGDSLHEHIANLAGSPAIKKGILQTVKVVDELVKVMGRHKPENIVIEMARE
NQTTQKGQKNSRERMKRIEEGIKELGSQILKEHPVENTQLQNEKLYLYYLQ
NGRDMYVDQELDINRLSDYDVDHIVPQSFLKDDSIDNKVLTRSDKNRGKSD
NVPSEEVVKKMKNYWRQLLNAKLITQRKFDNLTKAERGGLSELDKAGFIKR
QLVETRAITKHVAQILDSRMNTKYDENDKLIREVKVITLKSKLVSDFRKDF
QFYKVREINNYHHAHDAYLNAVVGTALIKKYPKLESEFVYGDYKVYDVRKM
IAKSEQEIGKATAKYFFYSNIMNFFKTEITLANGEIRKRPLIETNGETGEI
VWDKGRDFATVRKVLSMPQVNIVKKTEVQTGGFSKESILPKRNSDKLIARK
KDWDPKKYGGFDSPTVAYSVLVVAKVEKGKSKKLKSVKELLGITIMERSSF
EKNPIDFLEAKGYKEVKKDLIIKLPKYSLFELENGRKRMLASAGELQKGNE
LALPSKYVNFLYLASHYEKLKGSPEDNEQKQLFVEQHKHYLDEIIEQISEF
SKRVILADANLDKVLSAYNKHRDKPIREQAENIIHLFTLTNLGAPAAFKYF
DTTIDRKRYTSTKEVLDATLIHQSITGLYETRIDLSQLGGD.

[0368] In some cases, a suitable RNA-guided enzyme that exhibits nickase activity comprises an amino acid sequence having at least 80%, at least 85%, at least 90%, at least 95%, at least 98%, at least 99%, or 100%, amino acid sequence identity to the following “nicking enhanced” Cas9 amino acid sequence:

(SEQ ID NO: 1211)
DKKYSIGLAIGTNSVGWAVITDEYKVPSKKFKVLGNTDRHSIKKNLIGALL
FDSGETAEATRLKRTARRRYTRRKNRICYLQEIFSNEMAKVDDSFFHRLEE
SFLVEEDKKHERHPIFGNIVDEVAYHEKYPTIYHLRKKLVDSTDKADLRLI
YLALAHMIKFRGHFLIEGDLNPDNSDVDKLFIQLVQTYNQLFEENPINASG
VDAKAILSARLSKSRRLENLIAQLPGEKKNGLFGNLIALSLGLTPNFKSNF
DLAEDAKLQLSKDTYDDDLDNLLAQIGDQYADLFLAAKNLSDAILLSDILR
VNTEITKAPLSASMIKRYDEHHQDLTLLKALVRQQLPEKYKEIFFDQSKNG
YAGYIDGGASQEEFYKFIKPILEKMDGTEELLVKLNREDLLRKQRTFDNGS
IPHQIHLGELHAILRRQEDFYPFLKDNREKIEKILTFRIPYYVGPLARGNS
RFAWMTRKSEETITPWNFEEVVDKGASAQSFIERMTNFDKNLPNEKVLPKH
SLLYEYFTVYNELTKVKYVTEGMRKPAFLSGEQKKAIVDLLFKTNRKVTVK
QLKEDYFKKIECFDSVEISGVEDRFNASLGTYHDLLKIIKDKDFLDNEENE
DILEDIVLTLTLFEDREMIEERLKTYAHLFDDKVMKQLKRRRYTGWGRLSR
KLINGIRDKQSGKTILDFLKSDGFANRNFMQLIHDDSLTFKEDIQKAQVSG
QGDSLHEHIANLAGSPAIKKGILQTVKVVDELVKVMGRHKPENIVIEMARE
NQTTQKGQKNSRERMKRIEEGIKELGSQILKEHPVENTQLQNEKLYLYYLQ
NGRDMYVDQELDINRLSDYDVDHIVPQSFLADDSIDNKVLTRSDKNRGKSD
NVPSEEVVKKMKNYWRQLLNAKLITQRKFDNLTKAERGGLSELDKAGFIKR
QLVETRQITKHVAQILDSRMNTKYDENDKLIREVKVITLKSKLVSDFRKDF
QFYKVREINNYHHAHDAYLNAVVGTALIKKYPALESEFVYGDYKVYDVRKM
IAKSEQEIGKATAKYFFYSNIMNFFKTEITLANGEIRKAPLIETNGETGEI
VWDKGRDFATVRKVLSMPQVNIVKKTEVQTGGFSKESILPKRNSDKLIARK
KDWDPKKYGGFDSPTVAYSVLVVAKVEKGKSKKLKSVKELLGITIMERSSF
EKNPIDFLEAKGYKEVKKDLIIKLPKYSLFELENGRKRMLASAGELQKGNE
LALPSKYVNFLYLASHYEKLKGSPEDNEQKQLFVEQHKHYLDEIIEQISEF
SKRVILADANLDKVLSAYNKHRDKPIREQAENIIHLFTLTNLGAPAAFKYF
DTTIDRKRYTSTKEVLDATLIHQSITGLYETRIDLSQLGGD.

[0369] In some cases, a suitable RNA-guided enzyme that exhibits nickase activity comprises an amino acid sequence having at least 80%, at least 85%, at least 90%, at least 95%, at least 98%, at least 99%, or 100%, amino acid sequence identity to the following “nicking” Cas9 amino acid sequence:

(SEQ ID NO: 1212)
DKKYSIGLAIGTNSVGWAVITDEYKVPSKKFKVLGNTDRHSIKKNLIGALL
FDSGETAEATRLKRTARRRYTRRKNRICYLQEIFSNEMAKVDDSFFHRLEE
SFLVEEDKKHERHPIFGNIVDEVAYHEKYPTIYHLRKKLVDSTDKADLRLI
YLALAHMIKFRGHFLIEGDLNPDNSDVDKLFIQLVQTYNQLFEENPINASG
VDAKAILSARLSKSRRLENLIAQLPGEKKNGLFGNLIALSLGLTPNFKSNF
DLAEDAKLQLSKDTYDDDLDNLLAQIGDQYADLFLAAKNLSDAILLSDILR
VNTEITKAPLSASMIKRYDEHHQDLTLLKALVRQQLPEKYKEIFFDQSKNG
YAGYIDGGASQEEFYKFIKPILEKMDGTEELLVKLNREDLLRKQRTFDNGS
IPHQIHLGELHAILRRQEDFYPFLKDNREKIEKILTFRIPYYVGPLARGNS
RFAWMTRKSEETITPWNFEEVVDKGASAQSFIERMTNFDKNLPNEKVLPKH
SLLYEYFTVYNELTKVKYVTEGMRKPAFLSGEQKKAIVDLLFKTNRKVTVK
QLKEDYFKKIECFDSVEISGVEDRFNASLGTYHDLLKIIKDKDFLDNEENE
DILEDIVLTLTLFEDREMIEERLKTYAHLFDDKVMKQLKRRRYTGWGRLSR
KLINGIRDKQSGKTILDFLKSDGFANRNFMQLIHDDSLTFKEDIQKAQVSG
QGDSLHEHIANLAGSPAIKKGILQTVKVVDELVKVMGRHKPENIVIEMARE
NQTTQKGQKNSRERMKRIEEGIKELGSQILKEHPVENTQLQNEKLYLYYLQ
NGRDMYVDQELDINRLSDYDVDHIVPQSFLKDDSIDNKVLTRSDKNRGKSD
NVPSEEVVKKMKNYWRQLLNAKLITQRKFDNLTKAERGGLSELDKAGFIKR
QLVETRQITKHVAQILDSRMNTKYDENDKLIREVKVITLKSKLVSDFRKDF
QFYKVREINNYHHAHDAYLNAVVGTALIKKYPKLESEFVYGDYKVYDVRKM
IAKSEQEIGKATAKYFFYSNIMNFFKTEITLANGEIRKRPLIETNGETGEI
VWDKGRDFATVRKVLSMPQVNIVKKTEVQTGGFSKESILPKRNSDKLIARK
KDWDPKKYGGFDSPTVAYSVLVVAKVEKGKSKKLKSVKELLGITIMERSSF
EKNPIDFLEAKGYKEVKKDLIIKLPKYSLFELENGRKRMLASAGELQKGNE
LALPSKYVNFLYLASHYEKLKGSPEDNEQKQLFVEQHKHYLDEIIEQISEF
SKRVILADANLDKVLSAYNKHRDKPIREQAENIIHLFTLTNLGAPAAFKYF
DTTIDRKRYTSTKEVLDATLIHQSITGLYETRIDLSQLGGD.

### UGI

[0370] In some cases, a DNA- or protein-modifying enzyme-containing fusion polypeptide of the present disclosure (e.g., a deaminase-containing base editor of the present disclosure) further includes a uracil glycosylase inhibitor (UGI) polypeptide. The UGI polypeptide can be positioned at the N-terminus, at the C-terminus, or internally within the fusion polypeptide.

[0371] In some cases, a suitable UGI polypeptide comprises an amino acid sequence having at least 80%, at least 85%, at least 90%, at least 95%, at least 98%, at least 99%, or 100%, amino acid sequence identity to the following amino acid sequence:

(SEQ ID NO: 1213)
TNLSDIIEKETGKQLVIQESILMLPEEVEEVIGNKPESDILVHTAYDESTD
ENVMLLTSDAPEYKPWALVIQDSNGENKIKML.

### NLS

[0372] In some cases, a DNA- or protein-modifying enzyme-containing fusion polypeptide of the present disclosure (e.g., a deaminase-containing base editor of the present disclosure) includes a nuclear localization signal (NLS). In some cases, a DNA- or protein-modifying enzyme-containing fusion polypeptide of the present disclosure (e.g., a deaminase-containing base editor of the present disclosure) comprises a single NLS at the N-terminus of the fusion polypeptide. In some cases, a DNA- or protein-modifying enzyme-containing fusion polypeptide of the present disclosure (e.g., a deaminase-containing base editor of the present disclosure) comprises 2, 3, or 4 NLSs at the N-terminus of the fusion polypeptide. In other instances, a DNA- or protein-modifying enzyme-containing fusion polypeptide of the present disclosure (e.g., a deaminase-containing base editor of the present disclosure) comprises a single NLS at the C-terminus of the fusion polypeptide. In some cases, a DNA- or protein-modifying enzyme-containing fusion polypeptide of the present disclosure (e.g., a deaminase-containing base editor of the present disclosure) comprises 2, 3, or 4 NLSs at the C-terminus of the fusion polypeptide.

[0373] Non-limiting examples of suitable NLSs include an NLS sequence derived from: the NLS of the SV40 virus large T-antigen, having the amino acid sequence PKKKRKV (SEQ ID NO:1172); the NLS from nucleoplasmin (e.g., the nucleoplasmin bipartite NLS with the sequence KRPAATKKAGQAKKKK (SEQ ID NO:1173)); the c-myc NLS having the amino acid sequence PAAKRVKLD (SEQ ID NO:1174) or RQRRNELKRSP (SEQ ID NO:1175); the hRNPA1 M9 NLS having the sequence NQSSNFGPMKGGNFGGRSSGPYGGGGQYFAKPRNQGGY (SEQ ID NO:1176); the sequence RMRIZFKNKGKDTAELRRRRVEVSVELRKAKKDEQILKRRNV (SEQ ID NO:1177) of the IBB domain from importin-alpha; the sequences VSRKRPRP (SEQ ID NO:1178) and PPKKARED (SEQ ID NO:1179) of the myoma T protein; the sequence PQPKKKPL (SEQ ID NO:1180) of human p53; the sequence SALIKKKKKMAP (SEQ ID NO:1181) of mouse c-abl IV; the sequences DRLRR (SEQ ID NO:1182) and PKQKKRK (SEQ ID NO:1183) of the influenza virus NS1; the sequence RKLKKKIKKL (SEQ ID NO:1185) of the Hepatitis virus delta antigen; the sequence REKKKFLKRR (SEQ ID NO:1185) of the mouse Mx1 protein; the sequence KRKGDEVDGVDEVAKKKSKK (SEQ ID NO:1186) of the human poly(ADP-ribose) polymerase; and the sequence RKCLQAGMNLEARKTKK (SEQ ID NO:1187) of the steroid hormone receptors (human) glucocorticoid. In some cases, an NLS comprises the amino acid sequence MDSLLMNRRKFLYQFKNVRWAKGRRETYLC (SEQ ID NO:1188). In general, NLS (or multiple NLSs) are of sufficient strength to drive accumulation of the fusion polypeptide in a detectable amount in the nucleus of a eukaryotic cell. Detection of accumulation in the nucleus may be performed by any suitable technique. For example, a detectable marker may be fused to the fusion polypeptide such that location within a cell may be visualized. Cell nuclei may also be isolated from cells, the contents of which may then be analyzed by any suitable process for detecting protein, such as immunohistochemistry, Western blot, or enzyme activity assay. Accumulation in the nucleus may also be determined indirectly.

### System Comprising a Modifying Enzyme-Containing Fusion Protein

[0374] The present disclosure provides a system comprising a DNA- or protein-modifying enzyme-containing fusion polypeptide of the present disclosure (e.g., a deaminase-containing base editor of the present disclosure). The system comprises: a) the DNA- or protein-modifying enzyme-containing fusion polypeptide; and b) a guide RNA.

[0375] The present disclosure provides a base-editing system comprising a deaminase-containing base editor of the present disclosure. The system comprises: a) a base-editing system comprising a deaminase-containing base editor of the present disclosure; and b) a guide RNA. In some cases, the guide RNA is a single-molecule guide RNA. In some cases, the guide RNA is a dual-molecule guide RNA. In some cases, the guide RNA comprises a modified base and/or a modified sugar and/or a non-naturally occurring internucleoside linkage, as described above.

### Examples of Non-Limiting Aspects of the Disclosure

[0376] Aspects, including embodiments, of the present subject matter described above may be beneficial alone or in combination, with one or more other aspects or embodiments. Without limiting the foregoing description, certain non-limiting aspects of the disclosure numbered 1-84 are provided below. As will be apparent to those of skill in the art upon reading this disclosure, each of the individually numbered aspects may be used or combined with any of the preceding or following individually numbered aspects. This is intended to provide support for all such combinations of aspects and is not limited to combinations of aspects explicitly provided below:

[0377] Aspect 1. A fusion polypeptide comprising: a) an enzymatically active RNA-guided endonuclease that introduces a single-stranded break in a target DNA; and b) an error-prone DNA polymerase.

[0378] Aspect 2. The fusion polypeptide of aspect 1, wherein the RNA-guided endonuclease is a class 2 CRISPR/Cas endonuclease.

[0379] Aspect 3. The fusion polypeptide of aspect 2, wherein the class 2 CRISPR/Cas endonuclease is a type V or type VI CRISPR/Cas endonuclease.

[0380] Aspect 4. The fusion polypeptide of aspect 2, wherein the class 2 CRISPR/Cas endonuclease is a Cas9 polypeptide.

[0381] Aspect 5. The fusion polypeptide of aspect 4, wherein the Cas9 polypeptide comprises a mutation that reduces off-target binding.

[0382] Aspect 6. The fusion polypeptide of aspect 3, wherein the RNA-guided endonuclease is a Cpf1 polypeptide.

[0383] Aspect 7. The fusion polypeptide of any one of aspects 1-6, further comprising a nuclear localization signal.

[0384] Aspect 8. The fusion polypeptide of any one of aspects 1-7, comprising a linker interposed between the RNA-guided endonuclease and the error-prone DNA polymerase.

[0385] Aspect 9. The fusion polypeptide of any one of aspects 1-8, further comprising a DNA-binding polypeptide that increases the processivity of the DNA polymerase.

[0386] Aspect 10. The fusion polypeptide of aspect 9, wherein the DNA-binding polypeptide that increases the processivity of the DNA polymerase is an Sso7d polypeptide.

[0387] Aspect 11. The fusion polypeptide of aspect 9, wherein the DNA-binding polypeptide that increases the processivity of the DNA polymerase is a helix-hairpin-helix domain of topoisomerase I.

[0388] Aspect 12. The fusion polypeptide of aspect 9, wherein the DNA-binding polypeptide that increases the processivity of the DNA polymerase is a thioredoxin binding domain of a T7 DNA polymerase or T3 polymerase.

[0389] Aspect 13. The fusion polypeptide of any one of aspects 1-12, wherein the fusion polypeptide, when complexed with a guide RNA, exhibits a target mutation rate of from 10⁻⁸ to 10² mutations per nucleotide per genome replication event.

[0390] Aspect 14. The fusion polypeptide of any one of aspects 1-12, wherein the fusion polypeptide, when complexed with a guide RNA, exhibits a target mutation rate of from 10⁻⁶ to 10⁵ mutations per nucleotide per genome replication event.

[0391] Aspect 15. The fusion polypeptide of any one of aspects 1-12, wherein the fusion polypeptide, when complexed with a guide RNA, exhibits a target mutation rate of from 10⁻⁵ to 10³ mutations per nucleotide per genome replication event.

[0392] Aspect 16. The fusion polypeptide of any one of aspects 1-12, wherein the fusion polypeptide, when complexed with a guide RNA, exhibits a target mutation rate of from 10⁻³ to 10⁻² mutations per nucleotide per genome replication event.

[0393] Aspect 17. The fusion polypeptide of any one of aspects 1-12, wherein the fusion polypeptide, when complexed with a guide RNA, exhibits a target mutation rate that is at least 5-fold higher than the global mutation rate exhibited by the error-prone DNA polymerase not fused to the RNA-guided endonuclease.

[0394] Aspect 18. The fusion polypeptide of any one of aspects 1-12, wherein the fusion polypeptide, when complexed with a guide RNA, exhibits a target mutation rate that is at least 10-fold higher than the global mutation rate exhibited by the error-prone DNA polymerase not fused to the RNA-guided endonuclease.

[0395] Aspect 19. The fusion polypeptide of any one of aspects 1-12, wherein the fusion polypeptide, when complexed with a guide RNA, exhibits a target mutation rate that is at least 10²-fold higher than the global mutation rate exhibited by the error-prone DNA polymerase not fused to the RNA-guided endonuclease.

[0396] Aspect 20. The fusion polypeptide of any one of aspects 1-19, wherein the fusion polypeptide, when complexed with a guide RNA, introduces mutations at a distance of from 1 nucleotide to 10⁴ nucleotides from a nick in a target DNA introduced by the RNA-guided endonuclease.

[0397] Aspect 21. The fusion polypeptide of any one of aspects 1-19, wherein the fusion polypeptide, when complexed with a guide RNA, introduces mutations at a distance of from 1 nucleotide to 100 nucleotides from a nick in a target DNA introduced by the RNA-guided endonuclease.

[0398] Aspect 22. The fusion polypeptide of any one of aspects 1-19, wherein the fusion polypeptide, when complexed with a guide RNA, introduces mutations at a distance of from 1 nucleotide to 50 nucleotides from a nick in a target DNA introduced by the RNA-guided endonuclease.

[0399] Aspect 23. The fusion polypeptide of any one of aspects 1-22, wherein the fusion polypeptide comprises, in order from N-terminus to C-terminus: a) the enzymatically active RNA-guided endonuclease; and b) the error-prone DNA polymerase.

[0400] Aspect 24. The fusion polypeptide of any one of aspects 1-22, wherein the fusion polypeptide comprises, in order from N-terminus to C-terminus: a) the enzymatically active RNA-guided endonuclease; b) a linker; and c) the error-prone DNA polymerase.

[0401] Aspect 25. The fusion polypeptide of any one of aspects 1-22, wherein the fusion polypeptide comprises, in order from N-terminus to C-terminus: a) the error-prone DNA polymerase; and b) the enzymatically active RNA-guided endonuclease.

[0402] Aspect 26. The fusion polypeptide of any one of aspects 1-22, wherein the fusion polypeptide comprises, in order from N-terminus to C-terminus: a) the error-prone DNA polymerase; b) a linker; and c) the enzymatically active RNA-guided endonuclease.

[0403] Aspect 27. The fusion polypeptide of any one of aspects 1-26, wherein the fusion polypeptide comprises, in order from N-terminus to C-terminus a) a nuclear localization signal; b) an enzymatically inactive RNA-guided endonuclease; and c) an error-prone DNA polymerase.

[0404] Aspect 28. The fusion polypeptide of any one of aspects 1-26, wherein the fusion polypeptide comprises, in order from N-terminus to C-terminus: a) a nuclear localization signal; b) an error-prone DNA polymerase; and c) an enzymatically inactive RNA-guided endonuclease.

[0405] Aspect 29. The fusion polypeptide of any one of aspects 28, wherein the DNA polymerase comprises an amino acid sequence having at least 85% amino acid sequence to the DNA polymerase I amino acid sequence depicted in FIG. 8, wherein the DNA polymerase has one or more of the following: an Ala at amino acid position 242, an Asn at amino acid position 709, an Arg at amino acid position 759, a Tyr at amino acid position 742, and a His at amino acid position 796.

[0406] Aspect 30. The fusion polypeptide of any one of aspects 28, wherein the DNA polymerase is a DNA polymerase beta, a DNA polymerase iota, a DNA polymerase nu, a DNA polymerase eta, or a DNA polymerase kappa.

[0407] Aspect 31. The fusion polypeptide of aspect 30, wherein the fusion polypeptide, when complexed with a guide RNA, exhibits a target mutation rate of 1 mutation per nucleotide per genome replication event.

[0408] Aspect 32. A system comprising: a) the fusion polypeptide of any one of aspects 1-31; and b) a guide RNA that comprises: i) a protein-binding segment comprising a nucleotide sequence that binds to the RNA-guided endonuclease; and ii) a target-binding segment comprising a nucleotide sequence that is complementary to a target nucleotide sequence in a target nucleic acid.

[0409] Aspect 33. The system of aspect 32, wherein the guide RNA is a single-molecule guide RNA.

[0410] Aspect 34. The system of aspect 32, wherein the guide RNA is a dual-molecule guide RNA.

[0411] Aspect 35. The system of any one of aspects 32-34, wherein the guide RNA comprises one or more of: a) a modified base; b) a modified backbone; c) a modified sugar moiety; and d) a non-natural internucleoside linkage.

[0412] Aspect 36. A cell comprising the fusion polypeptide of any one of aspects 1-31.

[0413] Aspect 37. The cell of aspect 36, wherein the cell is a prokaryotic cell.

[0414] Aspect 38. The cell of aspect 36, wherein the cell is a eukaryotic cell.

[0415] Aspect 39. The cell of any one of aspects 36-38, wherein the cell is in vitro.

[0416] Aspect 40. A cell comprising the system of any one of aspects 36-39.

[0417] Aspect 41. The cell of aspect 40, wherein the cell is a prokaryotic cell.

[0418] Aspect 42. The cell of aspect 40, wherein the cell is a eukaryotic cell.

[0419] Aspect 43. The cell of any one of aspects 40-42, wherein the cell is in vitro.

[0420] Aspect 44. A method of mutagenizing a target DNA, the method comprising contacting the target DNA with the system of any one of aspects 32-35.

[0421] Aspect 45. The method of aspect 44, wherein the target DNA is present in a cell.

[0422] Aspect 46. The method of aspect 44, wherein the cell is a prokaryotic cell.

[0423] Aspect 47. The method of aspect 45, wherein the cell is a eukaryotic cell.

[0424] Aspect 48. The method of aspect 47, wherein the cell is an animal cell.

[0425] Aspect 49. The method of aspect 47, wherein the cell is a plant cell.

[0426] Aspect 50. The method of aspect 49, wherein the plant cell is a cell of a dicotyledon.

[0427] Aspect 51. The method of aspect 49, wherein the plant cell is a cell of a monocotyledon.

[0428] Aspect 52. The method of any one of aspects 44-51, wherein the cell is in vitro.

[0429] Aspect 53. The method of any one of aspects 44-51, wherein the cell is in vivo.

[0430] Aspect 54. The method of any one of aspects 44-53, wherein mutations are introduced into the target DNA at a mutation rate of from 10⁻⁸ to 10⁻² mutations per nucleotide per genome replication event.

[0431] Aspect 55. The method of any one of aspects 44-53, wherein mutations are introduced into the target DNA at a mutation rate of from 10⁻⁶ to 10⁻⁵ mutations per nucleotide per genome replication event.

[0432] Aspect 56. The method of any one of aspects 44-53, wherein mutations are introduced into the target DNA at a mutation rate of from 10⁻⁵ to 10⁻³ mutations per nucleotide per genome replication event.

[0433] Aspect 57. The method of any one of aspects 44-53, wherein mutations are introduced into the target DNA at a mutation rate of from 10⁻³ to 10⁻² mutations per nucleotide per genome replication event.

[0434] Aspect 58. A base editor system comprising: a) the fusion polypeptide of any one of aspects 29-31; and b) a guide RNA that comprises: i) a protein-binding segment comprising a nucleotide sequence that binds to the RNA-guided endonuclease; and ii) a target-binding segment comprising a nucleotide sequence that is complementary to a target nucleotide sequence in a target nucleic acid.

[0435] Aspect 59. The system of aspect 58, wherein the guide RNA is a single-molecule guide RNA.

[0436] Aspect 60. The system of aspect 58, wherein the guide RNA is a dual-molecule guide RNA.

[0437] Aspect 61. The system of any one of aspects 58-60, wherein the guide RNA comprises one or more of: a) a modified base; b) a modified backbone; c) a modified sugar moiety; and d) a non-natural internucleoside linkage.

[0438] Aspect 62. A method of editing a target nucleotide sequence in a target nucleic acid, the method comprising contacting the target nucleotide sequence with the base editor system of any one of aspects 58-61.

[0439] Aspect 63. The method of aspect 62, wherein the target nucleotide sequence comprises a single nucleotide mutation that results in a disease or disorder in an organism.

[0440] Aspect 64. A fusion polypeptide comprising: a) an enzymatically active RNA-guided endonuclease that introduces a single-stranded break in a target DNA; b) a DNA polymerase; and c) modifying enzyme.

[0441] Aspect 65. The fusion polypeptide of aspect 64, wherein the modifying enzyme is a protein-modifying enzyme.

[0442] Aspect 66. The fusion polypeptide of aspect 64, wherein the modifying enzyme is a DNA-modifying enzyme.

[0443] Aspect 67. The fusion polypeptide of aspect 66, wherein the DNA-modifying enzyme is a cytidine deaminase or an adenosine deaminase.

[0444] Aspect 68. The fusion polypeptide of aspect 64, wherein the RNA-guided endonuclease is a class 2 CRISPR/Cas endonuclease.

[0445] Aspect 69. The fusion polypeptide of aspect 68, wherein the class 2 CRISPR/Cas endonuclease is a type V or type VI CRISPR/Cas endonuclease.

[0446] Aspect 70. The fusion polypeptide of aspect 68, wherein the class 2 CRISPR/Cas endonuclease is a Cas9 polypeptide.

[0447] Aspect 71. The fusion polypeptide of aspect 70, wherein the Cas9 polypeptide comprises a mutation that reduces off-target binding.

[0448] Aspect 72. The fusion polypeptide of aspect 64, wherein the RNA-guided endonuclease is a Cpf1 polypeptide.

[0449] Aspect 73. The fusion polypeptide of any one of aspects 64-72, further comprising a nuclear localization signal.

[0450] Aspect 74. The fusion polypeptide of any one of aspects 64-73, comprising a linker between the RNA-guided endonuclease and the DNA polymerase.

[0451] Aspect 75. The fusion polypeptide of any one of aspects 64-74, wherein the DNA polymerase is a high-fidelity DNA polymerase.

[0452] Aspect 76. The fusion polypeptide of any one of aspects 64-75, wherein the fusion polypeptide further comprises a uracil glycosylase inhibitor (UGI).

[0453] Aspect 77. A system comprising: a) the fusion polypeptide of any one of aspects 64-76; and b) a guide RNA that comprises: i) a protein-binding segment comprising a nucleotide sequence that binds to the RNA-guided endonuclease; and ii) a target-binding segment comprising a nucleotide sequence that is complementary to a target nucleotide sequence in a target nucleic acid.

[0454] Aspect 78. The system of aspect 77, wherein the guide RNA is a single-molecule guide RNA.

[0455] Aspect 79. The system of aspect 77, wherein the guide RNA is a dual-molecule guide RNA.

[0456] Aspect 80. The system of any one of aspects 77-79, wherein the guide RNA comprises one or more of: a) a modified base; b) a modified backbone; c) a modified sugar moiety; and d) a non-natural internucleoside linkage.

[0457] Aspect 81. A method of editing a target nucleotide sequence in a target nucleic acid, the method comprising contacting the target nucleotide sequence with the system of any one of aspects 77-80.

[0458] Aspect 82. A nucleic acid comprising a nucleotide sequence encoding the fusion polypeptide of any one of aspects 64-76.

[0459] Aspect 83. A recombinant expression vector comprising the nucleic acid of aspect 82.

[0460] Aspect 84. A cell comprising the nucleic acid of aspect 82 or the recombinant expression vector of aspect 83.

### EXAMPLES

[0461] The following examples are put forth so as to provide those of ordinary skill in the art with a complete disclosure and description of how to make and use the present invention, and are not intended to limit the scope of what the inventors regard as their invention nor are they intended to represent that the experiments below are all or the only experiments performed. Efforts have been made to ensure accuracy with respect to numbers used (e.g. amounts, temperature, etc.) but some experimental errors and deviations should be accounted for. Unless indicated otherwise, parts are parts by weight, molecular weight is weight average molecular weight, temperature is in degrees Celsius, and pressure is at or near atmospheric. Standard abbreviations may be used, e.g., bp, base pair(s); kb, kilobase(s); pl, picoliter(s); s or sec, second(s); min, minute(s); h or hr, hour(s); aa, amino acid(s); kb, kilobase(s); bp, base pair(s); nt, nucleotide(s); i.m., intramuscular(ly); i.p., intraperitoneal(ly); s.c., subcutaneous(ly); and the like.

### Example 1

[0462] A schematic depiction of a mutagenesis tool of the present disclosure is provided in FIG. 1. A fusion polypeptide comprising an error-prone nick-translating DNApol and a variant of Cas9 that nicks its target sequence (nCas9) is depicted in FIG. 1. The specificity of the polymerase initiation site created by the nCas9 offers single-base resolution for the start site of the editing window while the mutagenesis window length, mutation rate, and substitution bias are controlled by the polymerase processivity, fidelity, and misincorporation bias, characteristics chosen through polymerase variant selection. Because this genetic device will not rely on host machinery for the mutagenesis, it is readily adaptable to any transformation-competent organism. This mutagenesis tool is termed “EvolvR”, reflecting how evolution often begins with replicative errors.

[0463] FIG. 1. Fusion of DNApol to nCas9 for Targeted Mutagenesis.

[0464] A nicking Cas9 (nCas9) fused to an error prone DNA polymerase is targeted to the region to be mutated with an sgRNA. After the nCas9 makes a single stranded break, the polymerase binds to the nick, and synthesizes a new strand with low fidelity while displacing and degrading the original strand.

[0465] Mutator designs are tested for their ability to mutagenize target loci through fluctuation analysis, which determines mutation rates from the rate of reversing a nonsense mutation in an antibiotic: resistance gene. In this assay, depicted schematically in FIG. 2A, a plasmid expressing the EvolvR components (pMut) is cotransformed into E. coli with a plasmid containing a nonfunctional antibiotic resistance gene (pNARG) containing a disabling nonsense mutation. After sixteen hours of growth without the antibiotic, the cultures are plated on the antibiotic and the mutation rates are determined by applying the Ma-Sandri-Sarkar statistical analysis to the colony counts.

[0466] Preliminary fluctuation analysis estimated the mutation rate of wild-type E. coli to be approximately 10′ mutations per nucleotide per generation, which is similar to a previously reported 5.4×10⁻¹⁰. The first mutator architecture tested was a translational fusion of nCas9 and the most well characterized nick-translating DNA polymerase, E. coli DNA polymerase 1, with three fidelity-reducing mutations (PolI3M). These mutations include D424A, which inactivates proofreading activity, I709N, which is thought to enlarge the substrate-binding pocket by disrupting the hydrophobic pocket, and A759R, which is thought to stabilize the polymerase's closed conformation promoting translocation after a misincorporation. Combining these mutations results in a polymerase that has a reported mutation rate of approximately 8.1×10⁻⁴ mutations per nucleotide.

[0467] To control for changes in global mutation rate that occur as a result of expressing an error-prone polymerase in the cell, the rate of non-specific mutation accumulation will be determined by measuring the antibiotic-resistance reversion rate of cells carrying a pMut plasmid targeting the (fitness-neutral) dbpA gene in the E. coli genome. The targeted mutation rate will be determined with an sgRNA nicking 11 bases 5′ of the nonsense mutation. FIG. 2B shows that nCas9 alone has no difference in global and targeted mutation rate. Expressing nCas9 and PolI3M as separate proteins elevated the global mutation rate ˜100 fold and the targeted mutation rate ˜1,000 fold. An N-terminally fused PolI3M maintains the ˜100 fold increase in global mutation rate but provides a greater than 10,000 fold increase of mutation rate over wild-type at the targeted locus.

[0468] To promote the unbinding of the nuclease after cleavage, it was hypothesized that DNA residence time could be reduced by introducing a set of mutations into the fused nCas9 that are suggested to lower Cas9's non-specific DNA affinity. Using this mutant nCas9 (enCas9) increased the global mutation rate 1.9 fold while the targeted mutation rate increased 8.6 fold compared to nCas9.

[0469] FIG. 2C shows that the fidelity of the DNApol confers the targeted and global mutation rate. PolI with a D424A mutation (PolI1M) was less mutagenic than PolI with both D424A and I709N mutations (PolI3M). PolI3M was the most mutagenic.

[0470] FIG. 2A-2C. A Fluctuation Analysis Using Different Mutator Architectures Will Determine Targetability of Mutagenesis.

[0471] a) A fluctuation analysis will determine mutation rates by cotransforming E. coli with a plasmid coding the imitator architecture (pMut) and a plasmid containing an antibiotic resistance gene with a nonsense mutation (pNARG) and counting resistant colonies after 16 hours of growth. b) A fluctuation analysis showed that nCas9 and PolI3M-nCas9 do not increase the global or targeted mutation rate, as determined by an off target sgRNA and sgRNA nicking 11 nucleotides 5′ of the nonsense mutation, respectively. nCas9-PolI3M increased the global mutation rate 100 fold and increased the targeted mutation rate 10,000 fold. Replacing nCas9 with a variant proposed to have lower affinity for DNA (enCas9) increased the targeted mutation rate 8.6 fold while the global mutation rate increased 1.9 fold, c) enCas9 fused to PolI with a D424A mutation (PolI1M) was less mutagenic that enCas9 fused to PolI with D424A and 1709 mutations (PolI2M). enCas9 fused to PolI3M was that most mutagenic.

[0472] The mutagenesis window length can be determined with a fluctuation analysis using sgRNAs targeting different distances from the antibiotic resistance gene's nonsense mutation. To test whether the mutagenesis window length is determined by the processivity of the polymerase, PolI with T7 DNA polymerase's thioredoxin binding domain (PolI-TBD) was tested. This chimera has previously been shown to have higher processivity than PolI. Indeed, FIG. 3 shows that while PolI does not show any increase in mutagenesis over background when targeted 56 nucleotides from the nonsense mutation, PolI-TBD does. This suggests that the mutagenesis window length can be tuned by modifying the polymerase's processivity. It was found that a mutation that abolishes the flap endonuclease activity only slightly decreases the mutation rate. This suggests that DNA polymerases without flap endonuclease activity can be used, likely relying on endogenous single stranded exonucleases for degrading the displaced strand.

[0473] FIG. 3. Mutagenesis Window Length can be Tuned by Changing Polymerase Processivity.

[0474] enCas9-PolI3M has a mutagenesis window length between 11 and 56 nucleotides. enCas9-PolI3M-TBD has a mutagenesis window length between 56 and 197 nucleotides. Inactivating flap endonuclease activity slightly decreases targeted mutation rate.

[0475] As shown in FIG. 4A, cells are transformed with EvolvR constructs targeted to a neutral genomic locus. The number of cell generations is estimated by quantifying the viable cell count before and after the growth period. The genomic target is amplified from purified genomes using polymerase chain reaction (PCR) primers that simultaneously add Illumina adapters. A second round of PCR add indexes to de-multiplex pooled sequence runs. The samples are then analyzed with 300-base pair paired-end sequencing on an Illumina MiSeq.

[0476] FIG. 4A. Targeted amplification of genomic loci targeted with a mutator for a certain number of generations is sequenced with 300-bp completely overlapping paired-end sequencing with an Illumina MiSeq. Unmatching paired reads and low frequency variants are discarded. The variants are used to determine the distribution of types of substitution as well as the mutagenesis window length.

[0477] High throughput sequencing is used to characterize the mutation rate, frequency of each type of nucleotide substitution and mutagenesis window length of the optimal architecture and polymerase combinations. The target region is amplified from purified genomes using PCR primers that simultaneously add Illumina adapters. A second round of PCR adds indexes to de-multiplex pooled sequencing runs. The samples are then analyzed with 300 base pair paired-end sequencing on an Illumina MiSeq. To prevent sequencing errors contributing false positive mutational events to the analysis, the paired-end reads is compared to each other and any unidentical pairs are discarded. After aligning to a reference, VarScan2 is used to call the variants. Any variant represented by more than 0.4% of the total reads is considered a true mutational event. The mutations identified are used to quantify the relative frequency of the 12 types of substitutions and will determine a 5 hp window rolling average mutation rate. FIG. 4B shows that variants can be captured at a frequency greater than 0.4% within a window of twenty nucleotides 3′ of the nick using the enCas9-PolI3M construct and that all four nucleotides were substituted.

[0478] FIG. 4B. (left panel) Frequency of single nucleotide variants after 24 hours of growth (“on”=sgRNA causing nicking at position 0; “off”=sgRNA targeting dbpA, a safespot in the genome; “vector”=empty plasmid without enCas9-PolITM construct). (right panel) Distribution of point mutants' original nucleotide identity.

### Example 2

[0479] EvolvR, a system that can continuously diversify all nucleotides within a tunable window length at user-defined loci was developed. This was achieved by directly generating mutations using engineered DNA polymerases targeted to desired loci via CRISPR-guided nickases. Nickase and polymerase variants that offer a range of targeted mutation rates up to 7,770,000-fold greater than wild type cells, and editing window lengths up to 350 nucleotides were identified. EvolvR was then used to identify novel ribosomal mutations that confer resistance to the antibiotic spectinomycin. The results demonstrate that CRISPR-guided DNA polymerases enable multiplexed and continuous diversification of user-defined genomic loci that will be useful for a broad range of basic and biotechnological applications.

[0480] It was hypothesized that recruiting an error-prone, nick-translating DNA polymerase with a nicking variant of Cas9 (nCas9) could offer an ideal HDR-independent targeted mutagenesis tool, termed EvolvR (FIG. 22A). The specificity of the polymerase initiation site created by the nCas9 specifies the start site of the editing window, while the mutagenesis window length, mutation rate, and substitution bias are controlled by the polymerase variant's processivity, fidelity, and misincorporation bias, respectively.

[0481] FIG. 22A-22E|EvolvR (Error-Prone DNA Polymerase Fused to Nicking Cas9) Enables Targeted Mutagenesis.

[0482] a, The EvolvR system consists of a CRISPR-guided nickase that nicks the target locus and a fused DNA polymerase which performs error-prone nick translation. b, High-throughput sequencing shows that fusing nicking Cas9 (nCas9) to E. coli DNA polymerase I with the fidelity-reducing mutations D424A, I709N, and A759R (PolI3M) resulted in substitutions in a ˜17 nucleotide window 3′ from the nick. Only data points above 0.04% frequency were considered true substitutions (dotted line; see Methods). Expressing nCas9 fused to PolI3M with an off-target guide yielded only one substitution and at low-frequency, while an unfused nCas9 and PolI3M did not show substitutions at a frequency above 0.04%. c, All four nucleotides were substituted by nCas9-PolI3M. d, Description of fluctuation analysis workflow used to sensitively quantify targeted and global mutation rates. e, The global and targeted mutation rates of wild-type E. coli, nCas9 fused to PolI3M, unfused nCas9 and PolI3M, PolI3M alone, and nCas9 alone were determined by fluctuation analysis. On-target gRNA yields nicks 11 nucleotides 5′ of the nonsense mutation. Fluctuation analysis was performed with ten replicates of each group, and error bars represent the 95% confidence intervals.

[0483] In the initial design, nCas9 (Streptococcus pyogenes Cas9 harboring a D10A mutation) was fused to the N-terminus of a fidelity-reduced variant of E. coli DNA polymerase I (PolI) harboring the mutations D424A, I709N, and A759R (PolI3M)²¹. A plasmid (pEvolvR) expressing the nCas9-PolI3M and a gRNA in E. coli was tested for its ability to mutate a second plasmid targeted by the gRNA over 24 hours of propagation. High-throughput targeted amplicon sequencing revealed that the target plasmid accrued substitutions in a ˜17 nucleotide window 3′ of the nick site (FIG. 22B), consistent with the established 15-20 nucleotide processivity of PolI²². The presence of low-frequency substitutions 5′ of the nick site may be due to endogenous 3′ to 5′ exonucleases removing a few nucleotides 5′ of the nick before the polymerase initiates synthesis. Critically, substitutions of all four nucleotide types were observed (FIG. 22C). In addition to substitutions, PolI is known to create deletions, which accounted for 25% of the observed variants in the 17 nucleotide window²³. No insertions were detected. As controls, expressing nCas9-PolI3M with an off-target guide only showed one low-frequency substitution, while targeting pTarget with an unfused nCas9 and PolI3M, as well as nCas9 alone, did not show substitutions at a frequency greater than 0.04%.

[0484] To sensitively quantify the mutation rate and mutagenesis window length of EvolvR variants, a fluctuation analysis was designed²⁴. For this assay, the pEvolvR plasmid was cotransformed into E. coli with a plasmid (pTarget) containing the aadA spectinomycin resistance gene disabled by a nonsense mutation (FIG. 22D). After 16 hours of growth, the cultures were plated on spectinomycin and the mutation rates were determined from the number of resistant colony forming units (CFU). As shown in FIG. 22E, fluctuation analysis estimated the mutation rate of wild-type E. coli to be approximately 10⁻¹⁰ mutations per nucleotide per generation, similar to previously reported values²⁵. The global mutation rate (the mutation rate of the untargeted genome in cells expressing EvolvR) was determined by measuring the spectinomycin-resistance reversion rate of cells carrying a gRNA targeting dbpA, a fitness-neutral RNA helicase gene in the E. coli genome. The targeted mutation rate was determined with a gRNA nicking 11 nucleotides 5′ of the nonsense mutation in pTarget. Expressing nCas9 fused to the N-terminus of PolI3M dramatically increased the mutation rate at the targeted locus 24,500-fold over wild type while increasing the global mutation rate 120-fold over wild type (FIG. 22E), a global mutation rate comparable to that of previous E. coli targeted mutagenesis techniques^{1,27,28}. By comparison, expressing nCas9 and PolI3M as separate proteins, PolI3M alone, nCas9 alone, or catalytically inactive Cas9 (dCas9) fused to PolI3M, showed significantly lower targeted mutation rates (p<0.05 with a simple two-sided student's T test), suggesting that both PolI3M and the nick created by nCas9 are essential for EvolvR-mediated mutagenesis. Finally, by replacing the D10A nCas9, which nicks the strand complementary to the gRNA, with the H840A nickase, which nicks the strand non-complementary to the gRNA, it was found that the direction of EvolvR-mediated mutagenesis relative to the gRNA is dependent on which strand is nicked (FIG. 25).

[0485] FIG. 23A-23H|EvolvR Provides Tunable Mutation Rates and Mutagenesis Window Lengths, Combinatorial Mutations, Multiplexed Targeting, and Continuous Diversification of Genomic Loci.

[0486] a, Introducing mutations found to lower non-specific DNA affinity into the fused nCas9 (enCas9)²⁹ increased the global mutation rate 223-fold compared to the wild type mutation rate (1.9-fold greater than nCas9-PolI3M), while increasing the targeted mutation rate 212,038-fold above wild type (8.7-fold greater than nCas9-PolI3M). b, Mutagenesis rates were dependent on the fidelity of the polymerase. PolI with a D424A mutation (PolI1M) was less mutagenic than PolI with both D424A and I709N mutations (PolI2M), while PolI3M (D424A, I709N, A759R) was the most mutagenic. c, Screening mutations in PolI3M previously shown to decrease wild type PolI fidelity revealed that PolI3M with additional mutations F742Y and P796H (PolI5M) had a mutation rate 7,770,000-fold greater than wild type cells one nucleotide from the nick. Introduction of these mutations had no effect on the global mutation rate compared to PolI3M. Off-target mutation rates for the other variants were not measured. d, The editing window length was increased by incorporating the thioredoxin binding domain of bacteriophage T7 DNA polymerase into PolI3M (PolI3M-TBD). enCas9-PolI3M-TBD provided a targeted mutation rate 56 nucleotides from the nick that was 555-fold above the global mutation rate, while enCas9-PolI3M showed no targeted mutagenesis 56 nucleotides from the nick. e, enCas9-PolI3M-TBD targeted to a plasmid containing two nonsense mutations in the spectinomycin resistance gene (pTarget2) showed that EvolvR is able to generate combinations of multiple mutations. f, enCas9-PolI3M targeted to E. coli's endogenous genomic ribosomal protein subunit 5 gene, rpsE, generated 16,000-fold more spectinomycin resistant colony forming units (SpecR CFU) than when targeted to the dbpA locus. g, enCas9-PolI3M-TBD targeted to rpsL increased the rate of acquiring streptomycin resistance without increasing the rate of acquiring spectinomycin resistance. Coexpression of both rpsL and rpsE gRNA's increased both spectinomycin and streptomycin resistant CFUs. h, Cultures expressing enCas9-PolI3M-TBD and either the rpsL gRNA or both rpsE and rpsL gRNAs grew in streptomycin-supplemented media while cultures expressing an off-target gRNA or the rpsE gRNA did not. After back-dilution into spectinomycin- and streptomycin-supplemented media, only cultures expressing both rpsE and rpsL gRNAs grew. (For all figures, on-target gRNA nicked 11 nucleotides 5′ of the nonsense mutation unless labeled otherwise. Ten replicates of each group were performed for bar and scatter plots; error bars indicate 95% confidence intervals for mutation rates and one standard deviation from the mean for SpecR CFU/viable CFU and OD 600 nm. “*” denotes p<0.05 with a simple two-sided student's T test).

[0487] It was hypothesized that the targeted mutation rate could be further increased by promoting the dissociation of nCas9 from DNA after nicking the target locus. Therefore, a set of mutations (K848A, K1003A, R1060A) previously suggested to lower Cas9's non-specific DNA affinity³⁰ were introduced into the fused nCas9. The resulting enhanced nicking Cas9 (enCas9) fused to PolI3M increased the global mutation rate 223-fold compared to wild type cells (1.9-fold greater than nCas9-PolI3M), yet elevated the mutation rate at the targeted locus by 212,000-fold (8.7-fold greater than nCas9-PolI3M) (FIG. 23A).

[0488] PolI3M was initially chosen because it was the most error-prone variant of PolI previously characterized. However, it was hypothesized that the modularity of EvolvR would enable tuning of the mutation rate by using polymerases with different fidelities. First, it was confirmed that the fidelity of the polymerase determines mutation rates by comparing PolI variants, in decreasing order of fidelity: PolI1M (D424A), PolI2M (D424A, I709N), and PolI3M (D424A, I709N, A759R) (FIG. 23B). Next, to further increase EvolvR's targeted mutation rate, several additional mutations previously shown to individually decrease wild type PolI fidelity were screened^{21,31,32} (FIG. 24C). PolI3M with the additional mutations F742Y and P796H (PolI5M) displayed a mutation rate one nucleotide from the nick 7,770,000-fold greater than wild type cells, and 33-fold higher than PolI3M, making it the most error-prone PolI mutant ever reported. Surprisingly, PolI5M did not exhibit a higher global rate of mutagenesis than PolI3M (FIG. 24B) and did not show higher mutation rates than PolI3M 11 nucleotides from the nick (FIG. 26).

[0489] It was hypothesized that using more processive DNA polymerases could increase the editing window length, so PolI5M was exchanged for the more processive bacteriophage Phi29 DNA polymerase (Phi29). Coexpression of gRNAs targeting different distances from the nonsense mutation, either wild type Phi29 or variants with previously reported fidelity-reducing and thermostabilizing mutations, and the Phi29 single-stranded binding protein led to targeted mutagenesis both 56 and 347 nucleotides from the nick site (FIG. 27). However, the mutation rate at these distances was not as high as what was achieved with PolI3M at shorter distances.

[0490] It was hypothesized that an alternative method to increase the editing window length while retaining high mutation rates would be to increase the processivity of PolI. Previous work has shown that fusing the thioredoxin binding domain (TBD) of bacteriophage T7 DNA polymerase increases PolI's processivity³⁴. FIG. 23D shows that while the original enCas9-PolI3M did not show a difference between global and targeted mutation rates 56 nucleotides from the nick, incorporation of the TBD into the PolI3M EvolvR gene (enCas9-PolI3M-TBD) produced a 555-fold increase over the global mutation rate at this range. To leverage this increased editing window length, enCas9-PolI3M-TBD was targeted to a plasmid (pTarget2) containing two nonsense mutations (11 and 37 nucleotides from the nick) in the antibiotic resistance gene, and EvolvR's ability to generate combinations of multiple mutations with a single gRNA was thereby shown (FIG. 23E).

[0491] It was hypothesized that unintended translation products consisting of functional DNA polymerase not fused to a functional CRISPR-guided protein contributed to undesirable off-target mutagenesis³⁵. Therefore, the EvolvR coding sequence (enCas9-PolI3M-TBD-CO) was codon-optimized to remove three strong internal RBSs identified with the RBS Calculator³⁶. The off-target mutation rate decreased 4.14-fold when expressing enCas9-PolI3M-TBD-CO compared to enCas9-PolI3M-TBD while the on-target mutation rate only decreased 1.23-fold (FIG. 28).

[0492] The ability to couple EvolvR-mediated mutagenesis to a non-selectable genetic screen would considerably broaden EvolvR's utility. It was found that after targeting EvolvR to a plasmid containing a GFP cassette with an early termination codon, 0.06% and 0.07% of the population was expressing GFP while no cells were expressing GFP using an off-target gRNA (FIG. 29). Importantly, EvolvR also showed the capacity to diversify chromosomal loci by increasing the fraction of the population resistant to spectinomycin 16,000-fold after targeting enCas9-PolI3M to E. coli's endogenous ribosomal protein subunit 5 gene, rpsE, which has mutations known to confer resistance to spectinomycin³⁷ (FIG. 23F).

[0493] Next, it was hypothesized that EvolvR avoids the cell-viability and evolutionary escape issues associated with non-targeted mutagenesis systems³⁸. It was found that, unlike two previously developed non-targeted continuous mutagenesis systems, EvolvR does not impede cell viability or growth rate (FIGS. 30A and 30B). Additionally, targeting EvolvR to the rpsE gene evolved more spectinomycin resistant CFU's per mL compared to these previous E. coli non-targeted mutagenesis systems, even when normalized by optical density (FIG. 30).

[0494] It was hypothesized that EvolvR could enable simultaneous diversification of distant genomic loci through coexpression of multiple gRNAs. First, expression of a gRNA targeting enCas9-PolI3M-TBD to rpsL, a ribosomal protein subunit gene with mutations known to confer streptomycin resistance³⁹, increased the rate of acquiring streptomycin resistance compared to wildtype cells, without increasing spectinomycin resistant CFUs (FIG. 23G). In comparison, coexpression of the gRNAs targeting rpsE and rpsL generated approximately the same number of spectinomycin and streptomycin resistant CFUs as expression of the rpsE gRNA or rpsL gRNA alone, respectively. This capacity to simultaneously diversify multiple loci will be useful for identifying epistatic interactions. Expression of two gRNA's that nick separate strands at genomic loci separated by 100 base-pairs was lethal, while nicking the same strand at the same distance was not lethal. Therefore, if multiple gRNAs were used to increase the length of the target region, targeting the same strand is suggested.

[0495] To evolve resistance to both spectinomycin and streptomycin, it was hypothesized that EvolvR's continuous diversity generation could be utilized for continuous directed evolution, in which mutagenesis, selection, and amplification occur simultaneously, to allow adaptation to modulated selection pressures with minimal researcher intervention. First, cultures expressing enCas9-PolI3M-TBD and either the rpsL gRNA or both rpsE and rpsL gRNAs grew in liquid media supplemented with streptomycin, whereas cultures expressing an off-target gRNA or the rpsE gRNA did not (FIG. 23H). After the cultures were diluted 1000-fold into liquid media supplemented with both spectinomycin and streptomycin, only cultures expressing both rpsE and rpsL gRNAs grew.

[0496] FIG. 24A-24D|EvolvR Identified Novel Mutations to E. coli's Ribosomal Subunit 5 Gene, rpsE, that Confer Spectinomycin Resistance.

[0497] a, Spectinomycin inhibits protein synthesis through interactions with the 30S ribosome. b, enCas9-PolI3M-TBD targeted to different parts of the endogenous rpsE gene with five gRNAs showed higher rates of spectinomycin resistance than targeting dbpA (off-target). c, After selection, high-throughput sequencing of the resistant cells containing gRNA's A, B, and C revealed that all twelve types of substitutions as well as deletions (del) were generated. Error bars indicate one standard deviation from the mean. d, Five mutations not previously described as conferring spectinomycin resistance were regenerated in a new strain of E. coli (RE1000), and growth curves in varying concentrations of spectinomycin confirmed the mutations provide spectinomycin resistance. Shaded area represents +/−one standard deviation from the mean of three biological replicates.

[0498] Spectinomycin's clinical utility as a broad-spectrum antibiotic has motivated previous efforts to characterize genomic mutations conferring spectinomycin resistance^{40,41}. EvolvR's capacity was used to diversify the genomic rpsE gene to identify novel mutations that confer spectinomycin resistance by disrupting the spectinomycin binding pocket of the 30S ribosome (FIG. 24A). First, enCas9-PolI3M-TBD was targeted to five dispersed loci in the endogenous rpsE gene using gRNA's that nick after the 119^{th}, 187^{th}, 320^{th}, 403^{rd}, or 492^{nd} base pair within the 504 base pair rpsE coding sequence (FIG. 31). Then, the cell populations were challenged for growth on agar plates supplemented with varying concentrations of spectinomycin and observed that resistance was highest with the gRNAs targeted to the domain of the ribosomal subunit protein proposed to interact with spectinomycin (FIG. 24). After selection, high-throughput sequencing of the resistant cells containing gRNA's A, B, and C revealed that all twelve types of substitutions, as well as deletions, were generated (FIG. 24C). For functional analysis, five of the candidate mutations not previously described as providing spectinomycin resistance were introduced into a different strain of E. coli (RE1000) using oligonucleotide-mediated recombination. Growth curves in varying concentrations of spectinomycin confirmed that each of the five mutations (417-19; K23N, 424; 424; 426; G27D) provided varying levels of spectinomycin resistance, but reduced fitness in the absence of selection (FIG. 24D). Using these mutations, it was hypothesized that mutations that move Lys26 relative to the spectinomycin binding pocket confer resistance to spectinomycin by removing a hydrogen bond that stabilizes spectinomycin's interaction with the ribosome, which led to the discovery of more novel spectinomycin resistance-conferring mutations (FIG. 32). These mutations were accordingly submitted to the Antibiotic Resistance Genes Database⁴². This rapid method to determine genotypes conferring antibiotic resistance is generally useful for improving the effective use of antibiotics.

[0499] FIG. 25|The Direction of EvolvR-Mediated Mutagenesis Relative to the gRNA is Dependent on which Strand is Nicked.

[0500] The previous fluctuation analysis in FIG. 22E demonstrated that nCas9-PolI3M mutates a window 3′ of the nick site. Here the study directly tested whether mutations are being generated 5′ of the nick site using a different gRNA. Since DNA polymerases synthesize in the 5′-3′ direction, it was hypothesized that nCas9-PolI3M would not provide an elevated mutation rate 5′ of the nick site. The study indeed found that expressing a guide RNA which targeted nCas9(D10A)-PolI3M to nick 16 nucleotides 3′ from the nonsense mutation (red “x”) did not show targeted mutagenesis. It was hypothesized that targeted mutagenesis could be induced using the same gRNA by using a Cas9 variant harboring the H840A mutation, which nicks the DNA strand non-complementary to the gRNA, rather than the D10A mutation, which nicks the strand complementary to the gRNA. It was found that nCas9(H840A)-PolI3M increased the mutation rate 16 nucleotides 3′ from the nick by 52 fold compared to the global mutation rate of cells expressing an off-target gRNA. The D10A nCas9 variant was used for all subsequent experiments. “*” denotes p<0.05 with a simple two-sided student's T test).

[0501] FIG. 26|PolI5M Elevates Mutation Rate 1 but not 11 Nucleotides from the Nick Compared to PolI3M.

[0502] PolI3M with F742Y and P796H mutations (PolI5M) elevates the mutation rate 33 fold 1 nucleotide from the nick compared to PolI3M. PolI5M did not have a higher mutation rate than PolI3M 11 nucleotides from the nick. “*” denotes p<0.05 with a simple two-sided student's T test).

[0503] FIG. 27|Fusing a More Processive DNA Polymerase to enCas9 Increases the Target Window Length.

[0504] PolI was exchanged for a more processive and higher fidelity bacteriophage Phi29 DNA polymerase (Phi29). Due to Phi29 not having a flap endonuclease, residues 1-325 of PolI were inserted between enCas9 and Phi29. Using gRNA's targeting different distances from the nonsense mutation, it was found that Phi29 with two previously reported fidelity-reducing mutations (N62D and L384R) elevated the mutation rate 56 nucleotides from the nick compared to the global mutation rate's′. When Phi29's single-stranded binding protein (ssb), known to improve the activity of Phi29, was expressed, an elevation in targeted mutation rate was seen⁴⁹. Finally, since the activity of Phi29 is known to decrease at temperatures above 30° C. and the fluctuation analysis was performed at 37° C., mutations previously reported to improve the thermostability of Phi29 (iPhi29) were added and a targeted mutation rate 347 nucleotides from the nick site that was significantly greater than the global mutation rate was observed⁵⁰. Unfortunately, mutations decreasing Phi29's fidelity are known to decrease its processivity explaining the inability to identify Phi29 variants that retain high processivity while offering as high of a mutation rate as PolI3M³³. (Ten replicates of each group; error bars indicate 95% confidence intervals for mutation rates; “*” denotes p<0.05 with a simple two-sided student's T test).

[0505] FIG. 28|Removing Internal Ribosome Binding Sequences Decreases EvolvR-Mediated Off-Target Mutagenesis.

[0506] enCas9-PolI3M-TBD-CO is enCas9-PolI3M-TBD that was codon optimized to remove strong ribosome binding sites in the EvolvR coding sequence predicted to produce an untethered DNA polymerase. The off-target mutation rate decreased 4.14-fold when expressing enCas9-PolI3M-TBD-CO compared to enCas9-PolI3M-TBD while the on-target mutation rate only decreased 1.23-fold.

[0507] FIG. 29A-29B|EvolvR-Mediated Mutagenesis can be Coupled with a Non-Selectable Genetic Screen.

[0508] a, To test the capability for EvolvR-mediated mutagenesis to be coupled with a non-selectable genetic screen, a target plasmid containing a GFP cassette with an early termination codon in the GFP coding sequence (pTarget-GFP*) was designed. After cotransforming pEvolvR with pTarget-GFP* and growing for 24 hours, the GFP positive fraction was analyzed and sorted. In the two replicates expressing an off-target gRNA, no GFP cells were detected or sorted. In contrast, for the two replicates expressing a gRNA nicking four nucleotides away from the chain-terminating mutation in GFP's coding sequence, it was found that 0.06% and 0.07% of the total cells were GFP positive. These results agree with sequencing outcomes from FIG. 22B which showed that expressing nCas9-PolI3M for 24 hours produces substitutions in the target region at frequencies between 0.5% to 1%. b, After culturing the sorted populations, both replicates expressing an off-target gRNA did not show growth, while both replicates expressing the on-target gRNA grew bright green.

[0509] FIGS. 30A-30C|EvolvR Enables Targeted Genome Diversification without Affecting Viability or Growth Rate.

[0510] a, The viability of TG1 E. coli expressing EvolvR targeted to the essential rpsE gene was significantly higher than TG1 E. coli transformed with the MP6 plasmid and induced with 25 mM arabinose and 25 mM glucose (as previously described) as well as XL1-Red E. coli. Viability was measured relative to TG1 E. coli transformed with an empty control plasmid. b, TG1 E. coli transformed with an empty control plasmid and TG1 E. coli transformed with pEvolvR targeting the rpsE gene showed similar growth curves while XL1-Red E. coli and TG1 E. coli transformed with MP6 plasmid and induced with 25 mM arabinose and 25 mM glucose grew much slower and saturated at lower final optical densities. c, The spectinomycin resistant CFU per mL saturated culture normalized by optical density of TG1 targeting EvolvR to the rpsE gene was significantly higher than XL1-Red E. coli and TG1 E. coli transformed with MP6 plasmid and induced with 25 mM arabinose and 25 mM glucose. Asterisks (*) denote p<0.05 in two-tailed t-test.

[0511] FIG. 31|Locations of gRNA Targets and Novel Mutations Relative to the rpsE Gene.

[0512] enCas9-PolI3M-TBD was targeted to five dispersed loci in the endogenous rpsE gene using gRNA's that nick after the 119^{th}, 187^{th}, 320^{th}, 403^{rd}, or 492^{nd} base pair of the 504 base pair rpsE coding sequence. The locations of the previously identified rpsE mutations that provide spectinomycin resistance are colored orange and the region where new spectinomycin resistance mutations were identified is highlighted in red.

[0513] FIGS. 32A-32B|Deletions in Ribosomal Protein S5 Confer Spectinomycin Resistance.

[0514] a, The mutations that were discovered confer spectinomycin resistance would be expected to move Lys26, which is predicted to hydrogen bond with spectinomycin, relative to the spectinomycin binding pocket. It was hypothesized that mutations that move Lys26 relative to the spectinomycin binding pocket removes that hydrogen bond and destabilizes spectinomycin's interaction with the ribosome, thereby conferring spectinomycin resistance. b, Therefore, the study tested whether deleting any single amino acid between residue 16 and 35 confers spectinomycin resistance. It was found that deleting residue 23, 24, 25, 26, 27, or 28 all provide spectinomycin resistance, while deleting any of the residues between 16 to 22 or 29 to 35 do not. This supports the hypothesis that one mechanism of resistance to spectinomycin is disruption of the interaction between Lys26 and spectinomycin.

### Methods

[0515] Plasmid Construction:

[0516] All plasmids were constructed using a modular Golden Gate strategy⁴³. pEvolvR consisted of EvolvR and gRNA expression cassettes, a pBR322 origin of replication, and a kanamycin resistance cassette. pTarget consisted of a p15a origin of replication carrying both a functional trimethoprim resistance cassette for selection and a disabled spectinomycin resistance gene (aadA) harboring a Leu106Ter non-sense mutation. pTarget2 is identical to pTarget with the exception that the aadA gene now carried both Glu98Ter and Leu106Ter mutations. The full plasmid sequences are provided in FIG. 36.

[0517] High-Throughput Sequencing of pTarget Sample Preparation:

[0518] A pTarget and pEvolvR plasmid were cotransformed into 50 uL of chemically competent TG1 E. coli prepared by a TSS/KCM method. Cells were allowed to recover in the TSS/LB solution for 1 hour, before 4 tit of the transformation mix was inoculated into 2 mL of LB containing 25 μg/mL kanamycin and 15 μg/mL trimethoprim. The cultures were grown for 24 hours at 37° C. while shaking at 750 rpm. 1.5 mLs of each culture was miniprepped using a Zippy Plasmid Prep kit (Zymo Research).

[0519] The oligos pTarget-F and pTarget-R were used to amplify the target region in a 20 cycle PCR reaction using 100 ng of miniprepped DNA as the template. A second PCR reaction added Illumina sequencing adapters and indices to the previous PCR product over 10 thermocycles. A Qubit fluorimeter was used to quantify the DNA prior to pooling samples. The sample pool was submitted to the UC Berkeley Vincent J. Coates Genomics Sequencing Laboratory for quality control and sequencing. Quality control consisted of fragment analysis (Advanced Analytical) and concentration measurement of the sequenceable fraction by quantitative PCR (Kapa Biosystems). The pooled sample was mixed with Illumina PhiX sequencing control library at 10% molarity, diluted to 14 pM, denatured, and run on an Illumina MiSeq using a 150 bp paired-end read MiSeq Reagent Kit v2. Resulting basecall files where converted into demultiplexed fastq format using Illumina's version 2.17 bcl2fastq.

[0520] High-Throughput Sequencing Data Analysis:

[0521] Perfectly complementary paired reads were filtered and the 5 randomized nucleotides, amplification primer sequences, and first and last three nucleotides were trimmed using a custom python script. Bwa and samtools were used to generate alignment files using the wild type aadA gene sequence as a reference. VarScan2 was used for variant calling with the parameters: min-coverage 1; min-reads2 1; variants 1; min-var-freq 0.0005; p-value 0.99⁴⁴. The limit of detection was determined by sequencing a culture transformed with an empty vector as a control. The highest frequency variant was 0.04% so all substitutions with a frequency under 0.05% were discarded.

[0522] Fluctuation Analysis Assay:

[0523] 50 μL of chemically competent TG1 E. coli were contransformed with pEvolvR and pTarget or pTarget2. After 1 hour of recovery at 37° C., 4 μL was inoculated into a 1.996 mL LB containing 25 μg/mL Kanamycin and 15 μg/mL Trimethoprim. After shaking at 37° C. for 16 hours, 1 mL and 1 μL of culture were plated on separate LB agar plates containing 50 μg/mL spectinomycin. Additionally, for viable CFU counting, 300 μL of 1:50,000,000 diluted culture was plated on LB agar plates. After 24 hours of incubation at 37° C., spectinomycin resistant CFU and viable CFU were counted. Ten replicates were used for each condition.

[0524] Calculation of Mutation Rate and Statistics:

[0525] The Ma-Sandri-Sarkar Maximum Likelihood Estimator was used to determine mutation rates as it is the most accurate and valid for all mutation rates²⁴. Falcor was used to calculate the mutation rates by inputing the viable and resistant CFU counts for the ten replicates⁴⁵. A simple two-tailed students t-test was carried out to determine p values as previously described⁴⁶.

[0526] Fluorescence-Activated Cell Sorting of EvolvR Libraries: Sony Cell Sorter SH800:

[0527] pEvolvR expressing either an on- or off-target gRNA was contransformed with pTarget-GFP* and shaken at 37° C. for 24 hours. For each sample, the GFP positive fraction of a million events was sorted with a Cell Sorter SH800 (Sony) using a 488 nm laser and a 525/50 nm emission filter.

[0528] Continuous Evolution of E. coli Resistant to Both Spectinomycin and Streptomycin:

[0529] pEvolvR expressing enCas9-PolI3M-TBD and either the off-target gRNA (targeting dbpA), rpsL gRNA, rpsE gRNA, or both rpsL and rpsE gRNAs was transformed into TG1 E. coli as previously described. After recovering for one hour, 4 μL of transformation mix was inoculated into 2 mL of LB supplemented with 25 μg/mL kanamycin and cultures were propagated over 16 hours at 37° C. 2 μL of culture was inoculated into 198 μL of LB supplemented with 50 μg/mL of streptomycin. A Tecan M1000 Pro spectrophotometer was used to measure each well's optical density over 12 hours of growth at 37° C. Each well was then diluted 1000-fold in LB supplemented with 50 μg/mL of streptomycin and 25 μg/mL of spectinomycin and the optical density of 200 μL of culture was again measured with a Tecan M1000 Pro spectrophotometer over 24 hours of growth at 37° C. Three biological replicates of each gRNA was characterized.

[0530] High-Throughput Sequencing of Spectinomycin Resistant E. coli:

[0531] A pEvolvR plasmid expressing enCas9-PolI3M-TBD with rpsE-gRNA-A, -B, -C, -D, or -E were transformed into chemically competent TG1 E. coli and recovered for 1 hour before innoculating 4 μl of the transformation mix into 1.996 mL of LB supplemented with 25 μg/mL kanamycin. The cultures were grown for 16 hours at 37° C. while shaking. 1 mL and 1 μL of each culture were plated on separate LB agar plates containing 10, 100, or 1000 μg/mL spectinomycin. Resistant CFUs were counted in the same manner as the fluctuation assays. The colonies of each plate were then scraped into separate cultures containing 2 mL of LB supplemented with 50 μg/mL spectinomycin and grown for 16 hours at 37° C. Genomic DNA was purified using the Wizard Genomic DNA Purification Kit (Promega). 100 ng of purified genome was then processed and sequenced in the same manner as already described for the sequencing analysis of pTarget, with the one exception that oligos rpsE-F and rpsE-R were used in the first round of PCR.

[0532] Oligonucleotide Recombination:

[0533] Re-introduction of rpsE mutations was performed using RE1000 E. coli (EcNR1 ilvG+ dam@λTerm dualTetO-pTet< >{kil, λ cI} ΔampR pConst::araE pConst::araC lacIQ1 recJ_off xonA_off dnaG.Q576A cymR< >SS7) developed for recombineering. Electro-competent cells were prepared fresh from overnight cultures of bacteria. The saturated culture was back-diluted 1:70 into 5 mL LB with 100 ng/μl anhydrous tetracycline and shaken at 37° C. until the OD reached 0.5. Cultures were then transferred to an ice-water bath and swirled for approximately 30 seconds before being chilled on ice for 10 minutes. Chilled cultures were centrifuged at 8000 RPM for 1 minute. The supernatant was aspirated and the pellet was resuspended in 1 mL ice-chilled 10% glycerol. The aspiration and resuspension was repeated twice. The final pellet was resuspended in 70 μL chilled 10% glycerol for each transformation. 1 μg of oligonucleotide was electroporated into the cells. The cells were recovered for 1 hr at 37° C. in 1 mL LB and streaked out on LB agar plates containing 50 μg/mL spectinomycin. Successful recombination was verified by Sanger sequencing a PCR-amplification of the genomic rpsE gene.

[0534] Spectinomycin Resistance Characterization:

[0535] Single colonies of sequence-verified rpsE mutants were grown overnight in LB media and then back-diluted 1:200 into LB containing 0, 100, or 1000 μg/mL spectinomycin. A Tecan M1000 Pro spectrophotometer was used to measure each well's optical density over 8 hours of growth at 37° C. Three biological replicates of each mutant at each spectinomycin concentration were characterized.

### Example 3

[0536] The EvolvR system was adapted for use in eukaryotic cells. EvolvR provides for diversification of all nucleotides at user-defined positions without generating double stranded breaks or relying on HDR.

[0537] A HEK293T cell line with a genomically-integrated, constitutively-expressed blue fluorescent protein (BFP) gene (HEK293T-BFP) was used. As depicted in FIG. 39A, a BFP gene (SEQ ID NO:1215) can become a green fluorescent protein (GFP) gene (SEQ ID NO:1217) by undergoing a particular single-nucleotide substitution (SEQ ID NO:1218) causing an H67Y missense mutation. The frequency of GFP positive cells in an EvolvR-expressing population was used as a relative proxy for the cell's targeted mutation rate.

[0538] An EvolvR expression plasmid, designated pEvolvR-HT, was constructed. The pEvolvR-HT expression plasmid can be transiently transfected into human cells. As depicted in FIG. 39B, the pEvolvR-HT expression plasmid consists of a gRNA expression cassette driven by the human U6 promoter as well as a CMV promoter-driven enCas9-PolI5M gene tagged with two SV40 nuclear localization sequences (NLSs) and an mCherry fluorescent reporter. Two days after transiently transfecting pEvolvR-HT into HEK293T-BFP cells, transfectants were enriched by sorting mCherry positive cells using FACS. As depicted in FIG. 39C, the sorted population was allowed to expand for five days; the frequency of GFP-expressing cells in the expanded population was analyzed using flow cytometry. As shown in FIG. 39D, while a population not expressing EvolvR and a population expressing EvolvR with an off-target gRNA targeting the aavs1 locus did not produce any GFP-expressing cells, a population expressing EvolvR with a gRNA that nicks 15 base-pairs away from the H67Y mutation showed 0.05% GFP-expressing cells. Estimating that the population expressed EvolvR for six generations, the observed mutation rate is approximately 2.5×10⁻⁴ mutations per nucleotide per generation. This mutation rate is comparable to the mutation rate observed in E. coli.

### Example 4

[0539] The base-pair editor (BPE) system was adapted for use in eukaryotic cells. BPEs provide for editing both nucleotides of user-defined base-pairs by directing the synthesis of a DNA polymerase across deaminated templates without relying on double-stranded breaks, HDR, genome replication, or redirection of endogenous mismatch repair pathways.

[0540] A HEK293T-BFP cell line with a genomically-integrated, constitutively-expressed BFP gene was used. As depicted in FIG. 39A, a BFP gene can become a green fluorescent protein (GFP) gene by undergoing a particular single-nucleotide substitution causing an H67Y missense mutation. The frequency of GFP-positive cells in a BPE-expressing population was used as a relative proxy for the BPE's editing efficiency.

[0541] A BPE expression plasmid was constructed. The BPE expression plasmid was transiently transfected into human cells. The plasmid consists of a CMV promoter-driven fusion cassette, where the cassette encodes the fusion protein: NLS, rAPOBEC1, enCas9, NLS, E. coli PolI. Three days after transiently transfecting this plasmid with a gRNA expression plasmid and a mCherry transfection control plasmid into HEK293T-BFP cells, the frequency of GFP-expressing cells was analyzed using flow cytometry.

[0542] As depicted in FIGS. 40C-40D, the population of cells transfected with the BPE plasmid showed 22% and 22.31% GFP-positive fractions when co-transfected with an on-target gRNA (FIG. 40C), and 0.37% and 0.41% GFP-positive fractions when co-transfected with an off-target gRNA (FIG. 40D). As shown in FIGS. 40A-40B, a similar plasmid lacking the polymerase showed 6.51% and 5.83% GFP-positive fractions with an on-target gRNA (FIG. 40A), and 0.40% and 0.41% GFP-positive fraction with an off-target gRNA (FIG. 40B). These results show that fusing a DNA polymerase to Cas9/deaminase fusions increases editing efficiencies.

### REFERENCES

[0543] 1. Camps, M., Naukkarinen, J., Johnson, B. P. & Loeb, L. A. Targeted gene evolution in Escherichia coli using a highly error-prone DNA polymerase I. Proc. Natl. Acad. Sci. U.S.A. 100, 9727-32 (2003).
[0544] 2. Crook, N. et al. In vivo continuous evolution of genes and pathways in yeast. Nat. Commun. 7, 13051 (2016).
[0545] 3. Esvelt, K. M., Carlson, J. C. & Liu, D. R. A system for the continuous directed evolution of biomolecules. Nature 472, 499-503 (2011).
[0546] 4. Ma, Y. et al. Targeted AID-mediated mutagenesis (TAM) enables efficient genomic diversification in mammalian cells. Nat. Methods 13, 1-9 (2016).
[0547] 5. Hess, G. T. et al. Directed evolution using dCas9-targeted somatic hypermutation in mammalian cells. Nat. Methods 13, 1036-1042 (2016).
[0548] 6. BRENNER, S., STRETTON, A. O. W. & KAPLAN, S. Genetic Code: The ‘Nonsense’ Triplets for Chain Termination and their Suppression. Nature 206, 994-998 (1965).
[0549] 7. Maheshri, N., Koerber, J. T., Kaspar, B. K. & Schaffer, D. V. Directed evolution of adeno-associated virus yields enhanced gene delivery vectors. Nat. Biotechnol. 24, 198-204 (2006).
[0550] 8. Bryson, D. I. et al. Continuous directed evolution of aminoacyl-tRNA synthetases. Nat. Chem. Biol. 13, 1253-1260 (2017).
[0551] 9. Hubbard, B. P. et al. Continuous directed evolution of DNA-binding proteins to improve TALEN specificity. Nat. Methods 12:939 (2015).
[0552] 10. Costantino, N. & Court, D. L. Enhanced levels of lambda Red-mediated recombinants in mismatch repair mutants. Proc. Natl. Acad. Sci. U.S.A 100, 15748-53 (2003).
[0553] 11. Wang, H. H. et al. Programming cells by multiplex genome engineering and accelerated evolution. Nature 460, 894-8 (2009).
[0554] 12. Barbieri, E. M., Muir, P., Akhuetie-Oni, B. O., Yellman, C. M. & Isaacs, F. J. Precise Editing at DNA Replication Forks Enables Multiplex Genome Engineering in Eukaryotes. Cell 171, 1453-1467.e13 (2017).
[0555] 13. DiCarlo, J. E. et al. Yeast Oligo-Mediated Genome Engineering (YOGE). ACS Synth. Biol. 2, 741-749 (2013).
[0556] 14. Ronda, C., Pedersen, L. E., Sommer, M. O. A. & Nielsen, A. T. CRMAGE: CRISPR Optimized MAGE Recombineering. Sci. Rep. 6, 19452 (2016).
[0557] 15. Findlay, G. M., Boyle, E. A., Hause, R. J., Klein, J. C. & Shendure, J. Saturation editing of genomic regions by multiplex homology-directed repair. Nature 513, 120-123 (2014).
[0558] 16. Mao, Z., Bozzella, M., Seluanov, A. & Gorbunova, V. DNA repair by nonhomologous end joining and homologous recombination during cell cycle in human cells. Cell Cycle 7, 2902-2906 (2008).
[0559] 17. Aguirre, A. J. et al. Genomic Copy Number Dictates a Gene-Independent Cell Response to CRISPR/Cas9 Targeting. Cancer Discov. 6, 914-29 (2016).
[0560] 18. Choi, P. S. & Meyerson, M. Targeted genomic rearrangements using CRISPR/Cas technology. Nat. Commun. 5, 4728 (2014).
[0561] 19. Frock, R. L. et al. Genome-wide detection of DNA double-stranded breaks induced by engineered nucleases. Nat. Biotechnol. 33, 179-186 (2014).
[0562] 20. Mao, Z., Bozzella, M., Seluanov, A. & Gorbunova, V. Comparison of nonhomologous end joining and homologous recombination in human cells. DNA Repair (Amst). 7, 1765-71 (2008).
[0563] 21. Camps, M., Naukkarinen, J., Johnson, B. P. & Loeb, L. A. Targeted gene evolution in Escherichia coli using a highly error-prone DNA polymerase I. Proc. Natl. Acad. Sci. U.S.A 100, 9727-32 (2003).
[0564] 22. Bambara, R. A. & Choi, T. On the Processive Mechanism of Escherichia coli DNA Polymerase I Quantitative Assessment of Processivity. J. Biol. Chem. 253, 413-423 (1973).
[0565] 23. de Boer, J. G. & Ripley, L. S. An in vitro assay for frameshift mutations: hotspots for deletions of 1 bp by Klenow-fragment polymerase share a consensus DNA sequence. Genetics 118, (1988).
[0566] 24. Sarkar, S., Ma, W. T. & Sandri, G. v. H. On fluctuation analysis: a new, simple and efficient method for computing the expected number of mutants. Genetica 85, 173-179 (1992).
[0567] 25. Drake, J. W. A constant rate of spontaneous mutation in DNA-based microbes. Proc. Natl. Acad. Sci. U.S.A. 88, 7160-4 (1991).
[0568] 26. Jagessar, K. L. & Jain, C. Functional and molecular analysis of Escherichia coli strains lacking multiple DEAD-box helicases. RNA 16, 1386-92 (2010).
[0569] 27. Fijalkowska, I. J. & Schaaper, R. M. Mutants in the Exo I motif of Escherichia coli dnaQ: defective proofreading and inviability due to error catastrophe. Proc. Natl. Acad. Sci. U.S.A. 93, 2856-61 (1996).
[0570] 28. Wang, H. H. et al. Programming cells by multiplex genome engineering and accelerated evolution. Nature 460, 894-8 (2009).
[0571] 29. Kleinstiver, B. P. et al. High-fidelity CRISPR-Cas9 nucleases with no detectable genome-wide off-target effects. Nature 529, 490-495 (2016).
[0572] 30. Slaymaker, I. M. et al. Rationally engineered Cas9 nucleases with improved specificity. Science (80-.). 351, 84-88 (2015).
[0573] 31. Minnick, D. T. et al. Side chains that influence fidelity at the polymerase active site of Escherichia coli DNA polymerase I (Klenow fragment). J. Biol. Chem. 274, 3067-75 (1999).
[0574] 32. Loh, E., Salk, J. J. & Loeb, L. A. Optimization of DNA polymerase mutation rates during bacterial evolution. Proc. Natl. Acad. Sci. U.S.A 107, 1154-9 (2010).
[0575] 33. Truniger, V., Lázaro, J. M., de Vega, M., Blanco, L. & Salas, M. phi 29 DNA polymerase residue Leu384, highly conserved in motif B of eukaryotic type DNA replicases, is involved in nucleotide insertion fidelity. J. Biol. Chem. 278, 33482-91 (2003).
[0576] 34. Wang, Y. et al. A novel strategy to engineer DNA polymerases for enhanced processivity and improved performance in vitro. Nucleic Acids Res. 32, 1197-1207 (2004).
[0577] 35. Whitaker, W. R., Lee, H., Arkin, A. P. & Dueber, J. E. Avoidance of Truncated Proteins from Unintended Ribosome Binding Sites within Heterologous Protein Coding Sequences. ACS Synth. Biol. 4, 249-257 (2015).
[0578] 36. Salis, H. M. The Ribosome Binding Site Calculator. in Methods in enzymology 498, 19-42 (2011).
[0579] 37. Funatsu, G., Schiltz, E. & Wittmann, H. G. Ribosomal proteins. XXVII. Localization of the amino acid exchanges in protein S5 from two Escherichia coli mutants resistant to spectinomycin. Mol. Gen. Genet. 114, 106-11 (1972).
[0580] 38. Zheng, X., Xing, X.-H. & Zheng, C. Targeted mutagenesis: A sniper-like diversity generator in microbial engineering. (2017). doi:10.1016/j.synbio.2017.07.001
[0581] 39. Timms, A. R., Steingrimsdottir, H., Lehmann, A. R. & Bridges, B. A. Mutant sequences in the rpsL gene of Escherichia coli B/r: Mechanistic implications for spontaneous and ultraviolet light mutagenesis. MGG Mol. Gen. Genet. 232, 89-96 (1992).
[0582] 40. Brocklehurst, P. & Peter. Antibiotics for gonorrhoea in pregnancy. in Cochrane Database of Systematic Reviews (ed. Kellie, F. J.) (John Wiley & Sons, Ltd, 2002). doi:10.1002/14651858.CD000098
[0583] 41. Lee, R. E. et al. Spectinamides: a new class of semisynthetic antituberculosis agents that overcome native drug efflux. Nat. Med. 20, 152-158 (2014).
[0584] 42. Liu, B. & Pop, M. ARDB—Antibiotic resistance genes database. Nucleic Acids Res. 37, 443-447 (2009).
[0585] 43. Lee, M. E., DeLoache, W. C., Cervantes, B. & Dueber, J. E. A Highly-characterized Yeast Toolkit for Modular, Multi-part Assembly. ACS Synth. Biol. (2015). doi:10.1021/sb500366v
[0586] 44. Koboldt, D. C. et al. VarScan 2: somatic mutation and copy number alteration discovery in cancer by exome sequencing. Genome Res. 22, 568-76 (2012).
[0587] 45. Hall, B. M., Ma, C.-X., Liang, P. & Singh, K. K. Fluctuation analysis CalculatOR: a web tool for the determination of mutation rate using Luria-Delbruck fluctuation analysis. Bioinformatics 25, 1564-5 (2009).
[0588] 46. Rosche, W. A. & Foster, P. L. Determining Mutation Rates in Bacterial Populations. Methods 20, 4-17 (2000).
[0589] 47. Hess, G. T. et al. Directed evolution using dCas9-targeted somatic hypermutation in mammalian cells. Nat. Methods 13, 1036-1042 (2016).
[0590] 48. de Vega, M., Lazaro, J. M., Salas, M. & Blanco, L. Primer-terminus stabilization at the 3′-5′ exonuclease active site of phi29 DNA polymerase. Involvement of two amino acid residues highly conserved in proofreading DNA polymerases. EMBO J. 15, 1182-92 (1996).
[0591] 49. Ducani, C., Bernardinelli, G. & Högberg, B. Rolling circle replication requires single-stranded DNA binding protein to avoid termination and production of double-stranded DNA. Nucleic Acids Res. 42, 10596-10604 (2014).
[0592] 50. Povilaitis, T., Alzbutas, G., Sukackaite, R., Siurkus, J. & Skirgaila, R. In vitro evolution of phi29 DNA polymerase using isothermal compartmentalized self replication technique. Protein Eng. Des. Sel. 29, 617-628 (2016).
[0593] 51. Greener, A., Callahan, M. & Jerpseth, B. An efficient random mutagenesis technique using an E. coli mutator strain. Mol. Biotechnol. 7, 189-195 (1997).
[0594] 52. Badran, A. H. & Liu, D. R. Development of potent in vivo mutagenesis plasmids with broad mutational spectra. Nat. Commun. 6, 8425 (2015).

[0595] While the present invention has been described with reference to the specific embodiments thereof, it should be understood by those skilled in the art that various changes may be made and equivalents may be substituted without departing from the true spirit and scope of the invention. In addition, many modifications may be made to adapt a particular situation, material, composition of matter, process, process step or steps, to the objective, spirit and scope of the present invention. All such modifications are intended to be within the scope of the claims appended hereto.

1. A fusion polypeptide comprising:
a) an enzymatically active RNA-guided endonuclease that introduces a single-stranded break in a target DNA; and
b) an error-prone DNA polymerase.

2. The fusion polypeptide of claim 1, wherein the RNA-guided endonuclease is:
a class 2 CRISPR/Cas endonuclease;
b) a type V CRISPR/Cas endonuclease;
c) a type VI CRISPR/Cas endonuclease;
d) a Cas9 polypeptide; or
e) a Cpf1 polypeptide.

3.-8. (canceled)

9. The fusion polypeptide of claim 1, further comprising a DNA-binding polypeptide that increases the processivity of the DNA polymerase.

10.-19. (canceled)

20. The fusion polypeptide of claim 1, wherein the fusion polypeptide, when complexed with a guide RNA, introduces mutations at a distance of from 1 nucleotide to 10⁴ nucleotides from a nick in a target DNA introduced by the RNA-guided endonuclease.

21.-22. (canceled)

23. The fusion polypeptide of claim 1, wherein the fusion polypeptide comprises, in order from N-terminus to C-terminus:
a) the enzymatically active RNA-guided endonuclease; and
b) the error-prone DNA polymerase; or
a) the enzymatically active RNA-guided endonuclease;
b) a linker; and
c) the error-prone DNA polymerase; or
a) the error-prone DNA polymerase; and
b) the enzymatically active RNA-guided endonuclease; or
a) the error-prone DNA polymerase;
b) a linker; and
c) the enzymatically active RNA-guided endonuclease; or
a) a nuclear localization signal;
b) an enzymatically inactive RNA-guided endonuclease; and
c) an error-prone DNA polymerase; or
a) a nuclear localization signal;
b) an error-prone DNA polymerase; and
c) an enzymatically inactive RNA-guided endonuclease.

24.-27. (canceled)

28. The fusion polypeptide of claim 1, wherein the fusion polypeptide comprises, in order from N-terminus to C-terminus
a) a nuclear localization signal;
b) an error-prone DNA polymerase; and
c) an enzymatically inactive RNA-guided endonuclease.

29. The fusion polypeptide of claim 1, wherein the DNA polymerase comprises an amino acid sequence having at least 85% amino acid sequence to the DNA polymerase I amino acid sequence depicted in FIG. 8, wherein the DNA polymerase has one or more of the following: an Ala at amino acid position 242, an Asn at amino acid position 709, an Arg at amino acid position 759, a Tyr at amino acid position 742, and a His at amino acid position 796.

30.-31. (canceled)

32. A system comprising:
a) the fusion polypeptide of claim 1; and
b) a guide RNA that comprises:
i) a protein-binding segment comprising a nucleotide sequence that binds to the RNA-guided endonuclease; and
ii) a target-binding segment comprising a nucleotide sequence that is complementary to a target nucleotide sequence in a target nucleic acid.

33.-35. (canceled)

36. A cell comprising the fusion polypeptide of claim 1.

37.-39. (canceled)

40. A cell comprising the system of claim 36.

41.-43. (canceled)

44. A method of mutagenizing a target DNA, the method comprising contacting the target DNA with the system of claim 32.

45.-57. (canceled)

58. A base editor system comprising:
a) the fusion polypeptide of claim 29; and
b) a guide RNA that comprises:
i) a protein-binding segment comprising a nucleotide sequence that binds to the RNA-guided endonuclease; and
ii) a target-binding segment comprising a nucleotide sequence that is complementary to a target nucleotide sequence in a target nucleic acid.

59.-61. (canceled)

62. A method of editing a target nucleotide sequence in a target nucleic acid, the method comprising contacting the target nucleotide sequence with the base editor system of claim 58.

63. (canceled)

64. A fusion polypeptide comprising:
a) an enzymatically active RNA-guided endonuclease that introduces a single-stranded break in a target DNA;
b) a DNA polymerase; and
c) a protein-modifying enzyme or a DNA-modifying enzyme.

65.-66. (canceled)

67. The fusion polypeptide of claim 64, wherein the DNA-modifying enzyme is a cytidine deaminase or an adenosine deaminase.

68. The fusion polypeptide of claim 64, wherein the RNA-guided endonuclease is:
a) a class 2 CRISPR/Cas endonuclease;
b) a type V CRISPR/Cas endonuclease;
c) a type VI CRISPR/Cas endonuclease;
d) a Cas9 polypeptide; or
e) a Cpf1 polypeptide.

69.-76. (canceled)

77. A system comprising:
a) the fusion polypeptide of claim 64; and
b) a guide RNA that comprises:
i) a protein-binding segment comprising a nucleotide sequence that binds to the RNA-guided endonuclease; and
ii) a target-binding segment comprising a nucleotide sequence that is complementary to a target nucleotide sequence in a target nucleic acid.

78.-80. (canceled)

81. A method of editing a target nucleotide sequence in a target nucleic acid, the method comprising contacting the target nucleotide sequence with the system of claim 77.

82. A nucleic acid comprising a nucleotide sequence encoding the fusion polypeptide of claim 64.

83. (canceled)

84. A cell comprising the nucleic acid of claim 82.

The application's sequence listing, which the Patent Office published only in electronic form, follows.

SEQUENCE LISTING (1248 sequences)

SEQ ID NO: 1 - protein, 15 aa, Artificial sequence
  Synthetic Sequence
IGLDIGTNSVGWAVI

SEQ ID NO: 2 - protein, 8 aa, Artificial sequence
  Synthetic Sequence
IVIEMARE

SEQ ID NO: 3 - protein, 27 aa, Artificial sequence
  Synthetic Sequence
DVDHIVPQSFLKDDSIDNKVLTRSDKN

SEQ ID NO: 4 - protein, 8 aa, Artificial sequence
  Synthetic Sequence
HHAHDAYL

SEQ ID NO: 5 - protein, 1368 aa, Streptococcus pyogenes [sequence omitted]

SEQ ID NO: 6 - protein, 1367 aa, Streptococcus pyogenes
MDKKYSIGLDIGTNSVGWAVITDDYKVPSKKLKVLGNTDRHGIKKNLIGALLFDSGETAEATRLKRTARRRYTRRKNRICYLQEIFSNEMAKVDDSFFHRLEESFLVEEDKKHERHPIFGNIVDEVAYHEKYPTIYHLRKKLADSTDKVDLRLIYLALAHMIKFRGHFLIEGDLNPDNSDVDKLFIQLVQTYNQLFEENPINASRVDAKAILSARLSKSRRLENLIAQLPGEKKNGLFGNLIALSLGLTPNFKSNFDLAEDAKLQLSKDTYDDDLDNLLAQIGDQYADLFLAAKNLSDAILLSDILRVNSEITKAPLSASMIKRYDEHHQDLTLLKALVRQQLPEKYKEIFFDQSKNGYAGYIDGGASQEEFYKFIKPILEKMDGTEELLAKLNREDLLRKQRTFDNGSIPYQIHLGELHAILRRQEDFYPFLKDNREKIEKILTFRIPYYVGPLARGNSRFAWMTRKSEETITPWNFEEVVDKGASAQSFIERMTNFDKNLPNEKVLPKHSLLYEYFTVYNELTKVKYVTEGMRKPAFLSGEQKKAIVDLLFKTNRKVTVKQLKEDYFKKIECFDSVEISGVEDRFNTSLGTYHDLLKIIKDKDFLDNEENEDILEDIVLTLTLFEDKEMIEERLKKYANLFDDKVMKQLKRRHYTGWGRLSRKLINGIRDKQSGKTILDFLKSDGFANRNFMQLINDDSLTFKEAIQKAQVSGQGHSLHEQIANLAGSPAIKKGILQTVKIVDELVKVMGHKPENIVIEMARENQTTQKGQKNSRERMKRIEEGIKELGSQILKEHPVENTQLQNEKLYLYYLQNGRDMYVDQELDINRLSDYDVDHIVPQSFLKDDSIDNKVLTRSDKNRGKSDNVPSEEVVKKMKNYWRQLLNAKLITQRKFDNLTKAERGGLSELDKAGFIKRQLVETRQITKHVAQILDSRMNTKYDENDKLIREVKVITLKSKLVSDFRKDFQFYKVREINNYHHAHDAYLNAVVGTALIKKYPKLESEFVYGDYKVYDVRKMIAKSEQEIGKATAKYFFYSNIMNFFKTEITLANGEIRKRPLIETNGETGEIVWDKGRDFATVRKVLSMPQVNIVKKTEVQTGGFSKESILPKRNSDKLIARKKDWDPKKYGGFDSPTVAYSVLVVAKVEKGKSKKLKSVKELLGITIMERSSFEKNPIDFLEAKGYKEVRKDLIIKLPKYSLFELENGRKRMLASAGELQKGNELALPSKYVNFLYLASHYEKLKGSPEDNEQKQLFVEQHKHYLDEIIEQISEFSKRVILADANLDKVLSAYNKHRDKPIREQAKNIIHLFTLTNLGAPAAFKYFDTTIERNRYKSIKEVLDATLIHQSITGLYEIRIDLSQLGGD

SEQ ID NO: 7 - protein, 1056 aa, Pasteurella multocida
MQTTNLSYILGLDLGIASVGWAVVEINENEDPIGLIDVGVRIFERAEVPKTGESLALSRRLARSTRRLIRRRAHRLLLAKRFLKREGILSTIDLEKGLPNQAWELRVAGLERRLSAIEWGAVLLHLIKHRGYLSKRKNESQTNNKELGALLSGVAQNHQLLQSDDYRTPAELALKKFAKEEGHIRNQRGAYTHTFNRLDLLAELNLLFAQQHQFGNPHCKEHIQQYMTELLMWQKPALSGEAILKMLGKCTHEKNEFKAAKHTYSAERFVWLTKLNNLRILEDGAERALNEEERQLLINHPYEKSKLTYAQVRKLLGLSEQAIFKHLRYSKENAESATFMELKAWHAIRKALENQGLKDTWQDLAKKPDLLDEIGTAFSLYKTDEDIQQYLTNKVPNSVINALLVSLNFDKFIELSLKSLRKILPLMEQGKRYDQACREIYGHHYGEANQKTSQLLPAIPAQEIRNPVVLRTLSQARKVINAIIRQYGSPARVHIETGRELGKSFKERREIQKQQEDNRTKRESAVQKFKELFSDFSSEPKSKDILKFRLYEQQHGKCLYSGKEINIHRLNEKGYVEIDHALPFSRTWDDSFNNKVLVLASENQNKGNQTPYEWLQGKINSERWKNFVALVLGSQCSAAKKQRLLTQVIDDNKFIDRNLNDTRYIARFLSNYIQENLLLVGKNKKNVFTPNGQITALLRSRWGLIKARENNNRHHALDAIVVACATPSMQQKITRFIRFKEVHPYKIENRYEMVDQESGEIISPHFPEPWAYFRQEVNIRVFDNHPDTVLKEMLPDRPQANHQFVQPLFVSRAPTRKMSGQGHMETIKSAKRLAEGISVLRIPLTQLKPNLLENMVNKEREPALYAGLKARLAEFNQDPAKAFATPFYKQGGQQVKAIRVEQVQKSGVLVRENNGVADNASIVRTDVFIKNNKFFLVPIYTWQVAKGILPNKAIVAHKNEDEWEEMDEGAKFKFSLFPNDLVELKTKKEYFFGYYIGLDRATGNISLKEHDGEISKGKDGVYRVGVKLALSFEKYQVDELGKNRQICRPQQRQPVR

SEQ ID NO: 8 - protein, 1368 aa, Streptococcus pyogenes
MDKKYSIGLDIGTNSVGWAVITDDYKVPSKKLKGLGNTDRHGIKKNLIGALLFDSGETAEATRLKRTARRRYTRRKNRICYLQEIFSNEMAKVDDSFFHRLEESFLVEEDKKHERHPIFGNIVDEVAYHEKYPTIYHLRKKLADSTDKVDLRLIYLALAHMIKFRGHFLIEGDLNPDNSDVDKLFIQLVQTYNQLFEENPINASRVDAKAILSARLSKSRRLENLIAQLPGEKKNGLFGNLIALSLGLTPNFKSNFDLAEDAKLQLSKDTYDDDLDNLLAQIGDQYADLFLAAKNLSDATLLSDILRVNSEITKAPLSASMIKRYDEHHQDLTLLKALVRQQLPEKYKEIFFDQSKNGYAGYIDGGASQEEFYKFIKPILEKMDGTEELLAKLNREDLLRKQRTFDNGSIPYQIHLGELHAILRRQEDFYPFLKDNREKIEKILTFRIPYYVGPLARGNSRFAWMTRKSEETITPWNFEEVVDKGASAQSFIERMTNFDKNLPNEKVLPKHSLLYEYFTVYNELTKVKYVTEGMRKPAFLSGEQKKAIVDLLFKTNRKVTVKQLKEDYFKKIECFDSVEISGVEDRFNASLGTYHDLLKIIKDKDFLDNEENEDILEDIVLTLTLFEDREMIEERLKTYAHLFDDKVMKQLKRRRYTGWGRLSRKLINGIRDKQSGKTILDFLKSDGFANRNFMQLIHDDSLTFKEDIQKAQVSGQGDSLHEHIANLAGSPAIKKGILQTVKVVDELVKVMGRHKPENIVIEMARENQTTQKGQKNSRERMKRIEEGIKELGSDILKEYPVENTQLQNEKLYLYYLQNGRDMYVDQELDINRLSDYDVDHIVPQSFLKDDSIDNKVLTRSDKNRGKSDNVPSEEVVKKMKNYWRQLLNAKLITQRKFDNLTKAERGGLSELDKVGFIKRQLVETRQITKHVAQILDSRMNTKYDENDKLIREVRVITLKSKLVSDFRKDFQFYKVREINNYHHAHDAYLNAVVGTALIKKYPKLESEFVYGDYKVYDVRKMIAKSEQEIGKATAKYFFYSNIMNFFKTEITLANGEIRKRPLIETNGETGEIVWDKGRDFATVRKVLSMPQVNIVKKTEVQTGGFSKESILPKRNSDKLIARKKDWDPKKYGGFDSPTVAYSVLVVAKVEKGKSKKLKSVKELLGITIMERSSFEKDPIDFLEAKGYKEVRKDLIIKLPKYSLFELENGRKRMLASAGELQKGNELALPSKYVNFLYLASHYEKLKGSPEDNEQKQLFVEQHKHYLDEIIEQISEFSKRVILADANLDKVLSAYNKHRDKPIREQAENIIHLFTLTNLGAPAAFKYFDTTIDRKRYTSTKEVLDATLIHQSITGLYETRIDLSQLGGD

SEQ ID NO: 9 - protein, 1334 aa, Listeria innocua
MKKPYTIGLDIGTNSVGWAVLTDQYDLVKRKMKIAGDSEKKQIKKNFWGVRLFDEGQTAADRRMARTARRRIERRRNRISYLQGIFAEEMSKTDANFFCRLSDSFYVDNEKRNSRHPFFATIEEEVEYHKNYPTIYHLREELVNSSEKADLRLVYLALAHIIKYRGNFLIEGALDTQNTSVDGIYKQFIQTYNQVFASGIEDGSLKKLEDNKDVAKILVEKVTRKEKLERILKLYPGEKSAGMFAQFISLIVGSKGNFQKPFDLIEKSDIECAKDSYEEDLESLLALIGDEYAELFVAAKNAYSAVVLSSIITVAETETNAKLSASMIERFDTHEEDLGELKAFIKLHLPKHYEEIFSNTEKHGYAGYIDGKTKQADFYKYMKMTLENIEGADYFIAKIEKENFLRKQRTFDNGAIPHQLHLEELEAILHQQAKYYPFLKENYDKIKSLVTFRIPYFVGPLANGQSEFAWLTRKADGEIRPWNIEEKVDFGKSAVDFIEKMTNKDTYLPKENVLPKHSLCYQKYLVYNELTKVRYINDQGKTSYFSGQEKEQIFNDLFKQKRKVKKKDLELFLRNMSHVESPTIEGLEDSFNSSYSTYHDLLKVGIKQEILDNPVNTEMLENIVKILTVFEDKRMIKEQLQQFSDVLDGVVLKKLERRHYTGWGRLSAKLLMGIRDKQSHLTILDYLMNDDGLNRNLMQLINDSNLSFKSIIEKEQVTTADKDIQSIVADLAGSPAIKKGILQSLKIVDELVSVMGYPPQTIVVEMARENQTTGKGKNNSRPRYKSLEKAIKEFGSQILKEHPTDNQELRNNRLYLYYLQNGKDMYTGQDLDIHNLSNYDIDHIVPQSFITDNSIDNLVLTSSAGNREKGDDVPPLEIVRKRKVFWEKLYQGNLMSKRKFDYLTKAERGGLTEADKARFIHRQLVETRQITKNVANILHQRFNYEKDDHGNTMKQVRIVTLKSALVSQFRKQFQLYKVRDVNDYHHAHDAYLNGVVANTLLKVYPQLEPEFVYGDYHQFDWFKANKATAKKQFYTNIMLFFAQKDRIIDENGEILWDKKYLDTVKKVMSYRQMNIVKKTEIQKGEFSKATIKPKGNSSKLIPRKTNWDPMKYGGLDSPNMAYAVVIEYAKGKNKLVFEKKIIRVTIMERKAFEKDEKAFLEEQGYRQPKVLAKLPKYTLYECEEGRRRMLASANEAQKGNQQVLPNHLVTLLHHAANCEVSDGKSLDYIESNREMFAELLAHVSEFAKRYTLAEANLNKINQLFEQNKEGDIKAIAQSFVDLMAFNAMGAPASFKFFETTIERKRYNNLKELLNSTIIYQSITGLYESRKRLDD

SEQ ID NO: 10 - protein, 1368 aa, Streptococcus pyogenes; identical to SEQ ID NO: 8

SEQ ID NO: 11 - protein, 1370 aa, Streptococcus agalactiae
MNKPYSIGLDIGTNSVGWSIITDDYKVPAKKMRVLGNTDKEYIKKNLIGALLFDGGNTAADRRLKRTARRRYTRRRNRILYLQEIFAEEMSKVDDSFFHRLEDSFLVEEDKRGSKYPIFATLQEEKDYHEKFSTIYHLRKELADKKEKADLRLIYIALAHIIKFRGHFLIEDDSFDVRNTDISKQYQDFLEIFNTTFENNDLLSQNVDVEAILTDKISKSAKKDRILAQYPNQKSTGIFAEFLKLIVGNQADFKKYFNLEDKTPLQFAKDSYDEDLENLLGQIGDEFADLFSAAKKLYDSVLLSGILTVIDLSTKAPLSASMIQRYDEHREDLKQLKQFVKASLPEKYQEIFADSSKDGYAGYIEGKTNQEAFYKYLSKLLTKQEDSENFLEKIKNEDFLRKQRTFDNGSIPHQVHLTELKAIIRRQSEYYPFLKENQDRIEKILTFRIPYYIGPLAREKSDFAWMTRKTDDSIRPWNFEDLVDKEKSAEAFIHRMTNNDFYLPEEKVLPKHSLIYEKFTVYNELTKVRYKNEQGETYFFDSNIKQEIFDGVFKEHRKVSKKKLLDFLAKEYEEFRIVDVIGLDKENKAFNASLGTYHDLEKILDKDFLDNPDNESILEDIVQTLTLFEDREMIKKRLENYKDLFTESQLKKLYRRHYTGWGRLSAKLINGIRDKESQKTILDYLIDDGRSNRNFMQLINDDGLSFKSIISKAQAGSHSDNLKEVVGELAGSPAIKKGILQSLKIVDELVKVMGYEPEQIVVEMARENQTTNQGRRNSRQRYKLLDDGVKNLASDLNGNILKEYPTDNQALQNERLFLYYLQNGRDMYTGEALDIDNLSQYDIDHIIPQAFIKDDSIDNRVLVSSAKNRGKSDDVPSLEIVKDCKVFWKKLLDAKLMSQRKYDNLTKAERGGLTSDDKARFIQRQLVETRQITKHVARILDERFNNELDSKGRRIRKVKIVTLKSNLVSNFRKEFGFYKIREVNNYHHAHDAYLNAVVAKAILTKYPQLEPEFVYGDYPKYNSYKTRKSATEKLFFYSNIMNFFKTKVTLADGTVVVKDDIEVNNDTGEIVWDKKKHFATVRKVLSYPQNNIVKKTEIQTGGFSKESILAHGNSDKLIPRKTKDIYLDPKKYGGFDSPIVAYSVLVVADIKKGKAQKLKTVTELLGITIMERSRFEKNPSAFLESKGYLNIRADKLIILPKYSLFELENGRRRLLASAGELQKGNELALPTQFMKFLYLASRYNESKGKPEEIEKKQEFVNQHVSYFDDILQLINDFSKRVILADANLEKINKLYQDNKENISVDELANNIINLFTFTSLGAPAAFKFFDKIVDRKRYTSTKEVLNSTLIHQSITGLYETRIDLGKLGED

SEQ ID NO: 12 - protein, 1345 aa, Streptococcus mutans
MKKPYSIGLDIGTNSVGWAVVTDDYKVPAKKMKVLGNTDKSHIEKNLLGALLFDSGNTAEDRRLKRTARRRYTRRRNRILYLQEIFSEEMGKVDDSFFHRLEDSFLVTEDKRGERHPIFGNLEEEVKYHENFPTIYHLRQYLADNPEKVDLRLVYLALAHIIKFRGHFLIEGKFDTRNNDVQRLFQEFLAVYDNTFENSSLQEQNVQVEEILTDKISKSAKKDRVLKLFPNEKSNGRFAEFLKLIVGNQADFKKHFELEEKAPLQFSKDTYEEELEVLLAQIGDNYAELFLSAKKLYDSILLSGILTVTDVGTKAPLSASMIQRYNEHQMDLAQLKQFIRQKLSDKYNEVFSDVSKDGYAGYIDGKTNQEAFYKYLKGLLNKIEGSGYFLDKIEREDFLRKQRTFDNGSIPHQIHLQEMRAIIRRQAEFYPFLADNQDRIEKLLTFRIPYYVGPLARGKSDFAWLSRKSADKITPWNFDEIVDKESSAEAFINRMTNYDLYLPNQKVLPKHSLLYEKFTVYNELTKVKYKTEQGKTAFFDANMKQEIFDGVFKVYRKVTKDKLMDFLEKEFDEFRIVDLTGLDKENKVFNASYGTYHDLCKILDKDFLDNSKNEKILEDIVLTLTLFEDREMIRKRLENYSDLLTKEQVKKLERRHYTGWGRLSAELIHGIRNKESRKTILDYLIDDGNSNRNFMQLINDDALSFKEEIAKAQVIGETDNLNQVVSDIAGSPAIKKGILQSLKIVDELVKIMGHQPENIVVEMARENQFTNQGRRNSQQRLKGLTDSIKEFGSQILKEHPVENSQLQNDRLFLYYLQNGRDMYTGEELDIDYLSQYDIDHIIPQAFIKDNSIDNRVLTSSKENRGKSDDVPSKDVVRKMKSYWSKLLSAKLITQRKFDNLTKAERGGLTDDDKAGFIKRQLVETRQITKHVARILDERFNTETDENNKKIRQVKIVTLKSNLVSNFRKEFELYKVREINDYHHAHDAYLNAVIGKALLGVYPQLEPEFVYGDYPHFHGHKENKATAKKFFYSNIMNFFKKDDVRTDKNGEIIWKKDEHISNIKKVLSYPQVNIVKKVEEQTGGFSKESILPKGNSDKLIPRKTKKFYWDTKKYGGFDSPIVAYSILVIADIEKGKSKKLKTVKALVGVTIMEKMTFERDPVAFLERKGYRNVQEENIIKLPKYSLFKLENGRKRLLASARELQKGNEIVLPNHLGTLLYHAKNIHKVDEPKHLDYVDKHKDEFKELLDVVSNFSKKYTLAEGNLEKIKELYAQNNGEDLKELASSFINLLTFTAIGAPATFKFFDKNIDRKRYTSTTEILNATLIHQSITGLYETRIDLNKLGGD

SEQ ID NO: 13 - protein, 1377 aa, Streptococcus agalactiae
MNKPYSIGLDIGTNSVGWSIITDDYKVPAKKMRVLGNTDKEYIKKNLIGALLFDGGNTAADRRLKRTARRRYTRRRNRILYLQEIFAEEMSKVDDSFFHRLEDSFLVEEDKRGSKYPIFATMQEEKYYHEKFPTIYHLRKELADKKEKADLRLVYLALAHIIKFRGHFLIEDDRFDVRNTDIQKQYQAFLEIFDTTFENNHLLSQNVDVEAILTDKISKSAKKDRILAQYPNQKSTGIFAEFLKLIVGNQADFKKHFNLEDKTPLQFAKDSYDEDLENLLGQIGDEFADLFSVAKKLYDSVLLSGILTVTDLSTKAPLSASMIQRYDEHHEDLKHLKQFVKASLPENYREVFADSSKDGYAGYIEGKTNQEAFYKYLLKLLTKQEGSEYFLEKIKNEDFLRKQRTFDNGSIPHQVHLTELRAIIRRQSEYYPFLKENQDRIEKILTFRIPYYVGPLAREKSDFAWMTRKTDDSIRPWNFEDLVDKEKSAEAFIHRMTNNDLYLPEEKVLPKHSLIYEKFTVYNELTKVRFLAEGFKDFQFLNRKQKETIFNSLFKEKRKVTEKDIISFLNKVDGYEGIAIKGIEKQFNASLSTYHDLKKILGKDFLDNTDNELILEDIVQTLTLFEDREMIKKCLDIYKDFFTESQLKKLYRRHYTGWGRLSAKLINGIRNKENQKTILDYLIDDGSANRNFMQLINDDDLSFKPIIDKARTGSHSDNLKEVVGELAGSPAIKKGILQSLKIVDELVKVMGYEPEQIVVEMARENQTTAKGLSRSRQRLTTLRESLANLKSNILEEKKPKYVKDQVENHHLSDDRLFLYYLQNGRDMYTKKALDIDNLSQYDIDHIIPQAFIKDDSIDNRVLVSSAKNRGKSDDVPSIEIVKARKMFWKNLLDAKLMSQRKYDNLTKAERGGLTSDDKARFIQRQLVETRQITKHVARILDERFNNEVDNGKKICKVKIVTLKSNLVSNFRKEFGFYKIREVNDYHHAHDAYLNAVVAKAILTKYPQLEPEFVYGMYRQKKLSKIVHEDKEEKYSEATRKMFFYSNLMNMFKRVVRLADGSIVVRPVIETGRYMRKTAWDKKKHFATVRKVLSYPQNNIVKKTEIQTGGFSKESILAHGNSDKLIPRKTKDIYLDPKKYGGFDSPIVAYSVLVVADIKKGKAQKLKTVTELLGITIMERSRFEKNPSAFLESKGYLNIRDDKLMILPKYSLFELENGRRRLLASAGELQKGNELALPTQFMKFLYLASRYNESKGKPEEIEKKQEFVNQHVSYFDDILQLINDFSKRVILADANLEKINKLYQDNKENIPVDELANNIINLFTFTSLGAPAAFKFFDKIVDRKRYTSTKEVLNSTLIHQSITGLYETRIDLGKLGED

SEQ ID NO: 14 - protein, 131 aa, Helicobacter hepaticus
MRILGFDIGITSIGWAYVESNELKDCGVRIFTKAENPKNGDSLAAPRREARGARRRLARRKARLNAIKRLLCKEFELNLNDYLANDGELPKAYQTSKDTKSPYELYTAFHWIIFAFCSIASSLSNRQMLPI

SEQ ID NO: 15 - protein, 1059 aa, Wolinella succinogenes
MIERILGVDLGISSLGWAIVEYDKDDEAANRIIDCGVRLFTAAETPKKKESPNKARREARGIRRVLNRRRVRMNMIKKLFLRAGLIQDVDLDGEGGMFYSKANRADVWELRHDGLYRLLKGDELARVLIHIAKHRGYKFIGDDEADEESGKVKKAGVVLRQNFEAAGCRTVGEWLWRERGANGKKRNKHGDYEISIHRDLLVEEVEAIFVAQQEMRSTIATDALKAAYREIAFFVRPMQRIEKMVGHCTYFPEERRAPKSAPTAEKFIAISKFFSTVIIDNEGWEQKIIERKTLEELLDFAVSREKVEFRHLRKFLDLSDNEIFKGLHYKGKPKTAKKREATLFDPNEPTELEFDKVEAEKKAWISLRGAAKLREALGNEFYGRFVALGKHADEATKILTYYKDEGQKRRELTKLPLEAEMVERLVKIGFSDFLKLSLKAIRDILPAMESGARYDEAVLMLGVPHKEKSAILPPLNKTDIDILNPTVIRAFAQFRKVANALVRKYGAFDRVHFELAREINTKGEIEDIKESQRKNEKERKEAADWIAETSFQVPLTRKNILKKRLYIQQDGRCAYTGDVIELERLFDEGYCEIDHILPRSRSADDSFANKVLCLARANQQKTDRTPYEWFGHDAARWNAFETRTSAPSNRVRTGKGKIDRLLKKNFDENSEMAFKDRNLNDTRYMARAIKTYCEQYWVFKNSHTKAPVQVRSGKLTSVLRYQWGLESKDRESHTHHAVDAIIIAFSTQGMVQKLSEYYRFKETHREKERPKLAVPLANFRDAVEEATRIENTETVKEGVEVKRLLISRPPRARVTGQAHEQTAKPYPRIKQVKNKKKWRLAPIDEEKFESFKADRVASANQKNFYETSTIPRVDVYHKKGKFHLVPIYLHEMVLNELPNLSLGTNPEAMDENFFKFSIFKDDLISIQTQGTPKKPAKIIMGYFKNMHGANMVLSSINNSPCEGFTCTPVSMDKKHKDKCKLCPEENRIAGRCLQGFLDYWSQEGLRPPRKEFECDQGVKFALDVKKYQIDPLGYYYEVKQEKRLGTIPQMRSAKKLVKK

SEQ ID NO: 16 - protein, 1409 aa, Wolinella succinogenes
MLVSPISVDLGGKNTGFFSFTDSLDNSQSGTVIYDESFVLSQVGRRSKRHSKRNNLRNKLVKRLFLLILQEHHGLSIDVLPDEIRGLFNKRGYTYAGFELDEKKKDALESDTLKEFLSEKLQSIDRDSDVEDFLNQIASNAESFKDYKKGFEAVFASATHSPNKKLELKDELKSEYGENAKELLAGLRVTKEILDEFDKQENQGNLPRAKYFEELGEYIATNEKVKSFFDSNSLKLTDMTKLIGNISNYQLKELRRYFNDKEMEKGDIWIPNKLHKITERFVRSWHPKNDADRQRRAELMKDLKSKEIMELLTTTEPVMTIPPYDDMNNRGAVKCQTLRLNEEYLDKHLPNWRDIAKRLNHGKFNDDLADSTVKGYSEDSTLLHRLLDTSKEIDIYELRGKKPNELLVKTLGQSDANRLYGFAQNYYELIRQKVRAGIWVPVKNKDDSLNLEDNSNMLKRCNHNPPHKKNQIHNLVAGILGVKLDEAKFAEFEKELWSAKVGNKKLSAYCKNIEELRKTHGNTFKIDIEELRKKDPAELSKEEKAKLRLTDDVILNEWSQKIANFFDIDDKHRQRFNNLFSMAQLHTVIDTPRSGFSSTCKRCTAENRFRSETAFYNDETGEFHKKATATCQRLPADTQRPFSGKIERYIDKLGYELAKIKAKELEGMEAKEIKVPIILEQNAFEYEESLRKSKTGSNDRVINSKKDRDGKKLAKAKENAEDRLKDKDKRIKAFSSGICPYCGDTIGDDGEIDHILPRSHTLKIYGTVFNPEGNLIYVHQKCNQAKADSIYKLSDIKAGVSAQWIEEQVANIKGYKTFSVLSAEQQKAFRYALFLQNDNEAYKKVVDWLRTDQSARVNGTQKYLAKKIQEKLTKMLPNKHLSFEFILADATEVSELRRQYARQNPLLAKAEKQAPSSHAIDAVMAFVARYQKVFKDGTPPNADEVAKLAMLDSWNPASNEPLTKGLSTNQKIEKMIKSGDYGQKNMREVFGKSIFGENAIGERYKPIVVQEGGYYIGYPATVKKGYELKNCKVVTSKNDIAKLEKIIKNQDLISLKENQYIKIFSINKQTISELSNRYFNMNYKNLVERDKEIVGLLEFIVENCRYYTKKVDVKFAPKYIHETKYPFYDDWRRFDEAWRYLQENQNKTSSKDRFVIDKSSLNEYYQPDKNEYKLDVDTQPIWDDFCRWYFLDRYKTANDKKSIRIKARKTFSLLAESGVQGKVFRAKRKIPTGYAYQALPMDNNVIAGDYANILLEANSKTLSLVPKSGISIEKQLDKKLDVIKKTDVRGLAIDNNSFFNADFDTHGIRLIVENTSVKVGNFPISAIDKSAKRMIFRALFEKEKGKRKKKTTISFKESGPVQDYLKVFLKKIVKIQLRTDGSISNIVVRKNAADFTLSFRSEHIQKLLK

SEQ ID NO: 17 - protein, 1374 aa, Fusobacterium nucleatum
MKKQKFSDYYLGFDIGTNSVGWCVTDLDYNVLRFNKKDMWGSRLFDEAKTAAERRVQRNSRRRLKRRKWRLNLLEEIFSDEIMKIDSNFFRRLKESSLWLEDKNSKEKFTLFNDDNYKDYDFYKQYPTIFHLRDELIKNPEKKDIRLIYLALHSIFKSRGHFLFEGQNLKEIKNFETLYNNLISFLEDNGINKSIDKDNIEKLEKIICDSGKGLKDKEKEFKGIFNSDKQLVAIFKLSVGSSVSLNDLFDTDEYKKEEVEKEKISFREQIYEDDKPIYYSILGEKIELLDIAKSFYDFMVLNNILSDSNYISEAKVKLYEEHKKDLKNLKYIIRKYNKENYDKLFKDKNENNYPAYIGLNKEKDKKEVVEKSRLKIDDLIKVIKGYLPKPERIEEKDKTIFNEILNKIELKTILPKQRISDNGTLPYQIHEVELEKILENQSKYYDFLNYEENGVSTKDKLLKTFKFRIPYYVGPLNSYHKDKGGNSWIVRKEEGKILPWNFEQKVDIEKSAEEFIKRMTNKCTYLNGEDVIPKDSFLYSEYIILNELNKVQVNDEFLNEENKRKIIDELFKENKKVSEKKFKEYLLVNQIANRTVELKGIKDSFNSNYVSYIKFKDIFGEKLNLDIYKEISEKSILWKCLYGDDKKIFEKKIKNEYGDILNKDEIKKINSFKFNTWGRLSEKLLTGIEFINLETGECYSSVMEALRRTNYNLMELLSSKFTLQESIDNENKEMNEVSYRDLIEESYVSPSLKRAILQTLKIYEEIKKITGRVPKKVFIEMARGGDESMKNKKIPARQEQLKKLYDSCGNDIANFSIDIKEMKNSLSSYDNNSLRQKKLYLYYLQFGKCMYTGREIDLDRLLQNNDTYDIDHIYPRSKVIKDDSFDNLVLVLKNENAEKSNEYPVKKEIQEKMKSFWRFLKEKNFISDEKYKRLTGKDDFELRGFMARQLVNVRQTTKEVGKILQQIEPEIKIVYSKAEIASSFREMFDFIKVRELNDTHHAKDAYLNIVAGNVYNTKFTEKPYRYLQEIKENYDVKKIYNYDIKNAWDKENSLEIVKKNMEKNTVNITRFIKEEKGELFNLNPIKKGETSNEIISIKPKLYDGKDNKLNEKYGYYTSLKAAYFIYVEHEKKNKKVKTFERITRIDSTLIKNEKNLIKYLVSQKKLLNPKIIKKIYKEQTLIIDSYPYTFTGVDSNKKVELKNKKQLYLEKKYEQILKNALKFVEDNQGETEENYKFIYLKKRNNNEKNETIDAVKERYNIEFNEMYDKFLEKLSSKDYKNYINNKLYTNFLNSKEKFKKLKLWEKSLILREFLKIFNKNTYGKYEIKDSQTKEKLFSFPEDTGRIRLGQSSLGNNKELLEESVTGLFVKKIKL

SEQ ID NO: 18 - protein, 1084 aa, Corynebacterium diphtheriae
MKYHVGIDVGTFSVGLAAIEVDDAGMPIKTLSLVSHIHDSGLDPDEIKSAVTRLASSGIARRTRRLYRRKRRRLQQLDKFIQRQGWPVIELEDYSDPLYPWKVRAELAASYIADEKERGEKLSVALRHIARHRGWRNPYAKVSSLYLPDGPSDAFKAIREEIKRASGQPVPETATVGQMVTLCELGTLKLRGEGGVLSARLQQSDYAREIQEICRMQEIGQELYRKIIDVVFAAESPKGSASSRVGKDPLQPGKNRALKASDAFQRYRIAALIGNLRVRVDGEKRILSVEEKNLVFDHLVNLTPKKEPEWVTIAEILGIDRGQLIGTATMTDDGERAGARPPTHDTNRSIVNSRIAPLVDWWKTASALEQHAMVKALSNAEVDDFDSPEGAKVQAFFADLDDDVHAKLDSLHLPVGRAAYSEDTLVRLTRRMLSDGVDLYTARLQEFGIEPSWTPPTPRIGEPVGNPAVDRVLKTVSRWLESATKTWGAPERVIIEHVREGFVTEKRAREMDGDMRRRAARNAKLFQEMQEKLNVQGKPSRADLWRYQSVQRQNCQCAYCGSPITFSNSEMDHIVPRAGQGSTNTRENLVAVCHRCNQSKGNTPFAIWAKNTSIEGVSVKEAVERTRHWVTDTGMRSTDFKKFTKAVVERFQRATMDEEIDARSMESVAWMANELRSRVAQHFASHGTTVRVYRGSLTAEARRASGISGKLKFFDGVGKSRLDRRHHAIDAAVIAFTSDYVAETLAVRSNLKQSQAHRQEAPQWREFTGKDAEHRAAWRVWCQKMEKLSALLTEDLRDDRVVVMSNVRLRLGNGSAHKETIGKLSKVKLSSQLSVSDIDKASSEALWCALTREPGFDPKEGLPANPERHIRVNGTHVYAGDNIGLFPVSAGSIALRGGYAELGSSFHHARVYKITSGKKPAFAMLRVYTIDLLPYRNQDLFSVELKPQTMSMRQAEKKLRDALATGNAEYLGWLVVDDELVVDTSKIATDQVKAVEAELGTIRRWRVDGFFSPSKLRLRPLQMSKEGIKKESAPELSKIIDRPGWLPAVNKLFSDGNVTVVRRDSLGRVRLESTAHLPVTWKVQ

SEQ ID NO: 19 - protein, 1395 aa, Treponema denticola
MKKEIKDYFLGLDVGTGSVGWAVTDTDYKLLKANRKDLWGMRCFETAETAEVRRLHRGARRRIERRKKRIKLLQELFSQEIAKTDEGFFQRMKESPFYAEDKTILQENTLFNDKDFADKTYHKAYPTINHLIKAWIENKVKPDPRLLYLACHNIIKKRGHFLFEGDFDSENQFDTSIQALFEYLREDMEVDIDADSQKVKEILKDSSLKNSEKQSRLNKILGLKPSDKQKKAITNLISGNKINFADLYDNPDLKDAEKNSISFSKDDFDALSDDLASILGDSFELLLKAKAVYNCSVLSKVIGDEQYLSFAKVKIYEKHKTDLTKLKNVIKKHFPKDYKKVFGYNKNEKNNNNYSGYVGVCKTKSKKLIINNSVNQEDFYKFLKTILSAKSEIKEVNDILTEIETGTFLPKQISKSNAEIPYQLRKMELEKILSNAEKHFSFLKQKDEKGLSHSEKIIMLLTFKIPYYIGPINDNHKKFFPDRCWVVKKEKSPSGKTTPWNFFDHIDKEKTAEAFITSRTNFCTYLVGESVLPKSSLLYSEYTVLNEINNLQIIIDGKNICDIKLKQKIYEDLFKKYKKITQKQISTFIKHEGICNKTDEVIILGIDKECTSSLKSYIELKNIFGKQVDEISTKNMLEEIIRWATIYDEGEGKTILKTKIKAEYGKYCSDEQIKKILNLKFSGWGRLSRKFLETVTSEMPGFSEPVNIITAMRETQNNLMELLSSEFTFTENIKKINSGFEDAEKQFSYDGLVKPLFLSPSVKKMLWQTLKLVKEISHITQAPPKKIFIEMAKGAELEPARTKTRLKILQDLYNNCKNDADAFSSEIKDLSGKIENEDNLRLRSDKLYLYYTQLGKCMYCGKPIEIGHVFDTSNYDIDHIYPQSKIKDDSISNRVLVCSSCNKNKEDKYPLKSEIQSKQRGFWNFLQRNNFISLEKLNRLTRATPISDDETAKFIARQLVETRQATKVAAKVLEKMFPETKIVYSKAETVSMFRNKFDIVKCREINDFHHAHDAYLNIVVGNVYNTKFTNNPWNFIKEKRDNPKIADTYNYYKVFDYDVKRNNITAWEKGKTIITVKDMLKRNTPIYTRQAACKKGELFNQTIMKKGLGQHPLKKEGPFSNISKYGGYNKVSAAYYTLIEYEEKGNKIRSLETIPLYLVKDIQKDQDVLKSYLTDLLGKKEFKILVPKIKINSLLKINGFPCHITGKTNDSFLLRPAVQFCCSNNEVLYFKKIIRFSEIRSQREKIGKTISPYEDLSFRSYIKENLWKKTKNDEIGEKEFYDLLQKKNLEIYDMLLTKHKDTIYKKRPNSATIDILVKGKEKFKSLIIENQFEVILEILKLFSATRNVSDLQHIGGSKYSGVAKIGNKISSLDNCILIYQSITGIFEKRIDLLKV

SEQ ID NO: 20 - protein, 1334 aa, Listeria monocytogenes
MKNPYTIGLDIGTNSVGWAVLTNQYDLVKRKMKVAGNSDKKQIKKNFWGVRLFDDGQTAVDRRMNRTARRRIERRRNRISYLQEIFAVEMANIDANFFCRLNDSFYVDSEKRNSRHPFFATIEEEVAYHDNYRTIYHLREKLVNSSEKADLRLVYLALAHIIKYRGNFLIEGALDTKNTSVDEVYKQFIETYNQVFMSNIEEGALAKVEENIEVANILAGKFTRREKFERILQLYPGEKSTGMFAQFISLIVGSKGNFQKVFDLIEKTDIECAKDSYEEDLETLLAIIGDEYAELFVAAKNTYNAVVLSSIITVTDTETNAKLSASMIERFDAHEKDLVELKAFIKLNLPKQYEEIFSNAAIDGYAGYIDGKTKQVDFYKYLKTILENIEGSDYFIAKIEEENFLRKQRTFDNGAIPHQLHLEELEAIIHQQAKYYPFLKEDYDKIKSLVTFRIPYFVGPLANGQSEFAWLTRKADGEIRPWNIEEKVDFGKSAVDFIEKMTNKDTYLPKENVLPKHSLCYQKYMVYNELTKIRYIDDQGKTNYFSGREKQQVFNDLFKQKRKVKKKDLELFLRNINHIESPTIEGLEDSFNASYATYHDLLKVGMKQEILDNPLNTEMLEDIVKILTVFEDKPMIKEQLQQFSDVLDGGVLKKLERRHYTGWGRLSAKLLVGIREKQSHLTILDYLMNDDGLNRNLMQLINDSNLSFKSIIEKEQVSTTDKDLQSIVAELAGSPAIKKGILQSLKIVDELVSIMGYPPQTIVVEMARENQTTGKGKNNSKPRYKSLEKAIKEFGSQILKEHPTDNQELKNNRLYLYYLQNGKDMYTGQELDIHNLSNYDIDHIVPQSFITDNSIDNLVLTSSAGNREKGGDVPPLEIVRKRKVFWEKLYQGNLMSKRKFDYLTKAERGGLTEADKARFIHRQLVETRQITKNVANILYQRFNKETDNHGNTMEQVRIVTLKSALVSQFRKQFQLYKVREVNGYHHAHDAYLNGVVANTLLKVYPQLEPEFVYGEYHQFDWFKANKATAKKQFYTNIMLFFAQKERIIDENGEILWDKKYLETIKKVLDYRQMNIVKKTEIQKGEFSKATIKPKGNSSKLIPRKENWDPMKYGGLDSPNMAYAVIIEHAKGKKKIVIEKKLIQINIMERKMFEKDEEAFLEEKGYRHPKVLTKLPKYTLYECEKGRRRMLASANEAQKGNQLVLSNHLVSLLYHAKNCEASDGKSLKYIEAHRETFSELLAQVSEFATRYTLADANLSKINNLFEQNKEGDIKAIAQSFVDLMAFNAMGAPASFKFFEATIDRKRYTNLKELLSSTIIYQSITGLYESRKRLDD

SEQ ID NO: 21 - protein, 1236 aa, Mycoplasma mobile
MYFYKNKENKLNKKVVLGLDLGIASVGWCLTDISQKEDNKFPIILHGVRLFETVDDSDDKLLNETRRKKRGQRRRNRRLFTRKRDFIKYLIDNNIIELEFDKNPKILVRNFIEKYINPFSKNLELKYKSVTNLPIGFHNLRKAAINEKYKLDKSELIVLLYFYLSLRGAFFDNPEDTKSKEMNKNEIEIFDKNESIKNAEFPIDKIIEFYKISGKIRSTINLKFGHQDYLKEIKQVFEKQNIDFMNYEKFAMEEKSFFSRIRNYSEGPGNEKSFSKYGLYANENGNPELIINEKGQKIYTKIFKTLWESKIGKCSYDKKLYRAPKNSFSAKVFDITNKLTDWKHKNEYISERLKRKILLSRFLNKDSKSAVEKILKEENIKFENLSEIAYNKDDNKINLPIINAYHSLTTIFKKHLINFENYLISNENDLSKLMSFYKQQSEKLFVPNEKGSYEINQNNNVLHIFDAISNILNKFSTIQDRIRILEGYFEFSNLKKDVKSSEIYSEIAKLREFSGTSSLSFGAYYKFIPNLISEGSKNYSTISYEEKALQNQKNNFSHSNLFEKTWVEDLIASPTVKRSLRQTMNLLKEIFKYSEKNNLEIEKIVVEVTRSSNNKHERKKIEGINKYRKEKYEELKKVYDLPNENTTLLKKLWLLRQQQGYDAYSLRKIEANDVINKPWNYDIDHIVPRSISFDDSFSNLVIVNKLDNAKKSNDLSAKQFIEKIYGIEKLKEAKENWGNWYLRNANGKAFNDKGKFIKLYTIDNLDEFDNSDFINRNLSDTSYITNALVNHLTFSNSKYKYSVVSVNGKQTSNLRNQIAFVGIKNNKETEREWKRPEGFKSINSNDFLIREEGKNDVKDDVLIKDRSFNGHHAEDAYFITIISQYFRSFKRIERLNVNYRKETRELDDLEKNNIKFKEKASFDNFLLINALDELNEKLNQMRFSRMVITKKNTQLFNETLYSGKYDKGKNTIKKVEKLNLLDNRTDKIKKIEEFFDEDKLKENELTKLHIFNHDKNLYETLKIIWNEVKIEIKNKNLNEKNYFKYFVNKKLQEGKISFNEWVPILDNDFKIIRKIRYIKFSSEEKETDEIIFSQSNFLKIDQRQNFSFHNTLYWVQIWVYKNQKDQYCFISIDARNSKFEKDEIKINYEKLKTQKEKLQIINEEPILKINKGDLFENEEKELFYIVGRDEKPQKLEIKYILGKKIKDQKQIQKPVKKYFPNWKKVNLTYMGEIFKK

SEQ ID NO: 22 - protein, 1372 aa, Legionella pneumophila
MESSQILSPIGIDLGGKFTGVCLSHLEAFAELPNHANTKYSVILIDHNNFQLSQAQRRATRHRVRNKKRNQFVKRVALQLFQHILSRDLNAKEETALCHYLNNRGYTYVDTDLDEYIKDETTINLLKELLPSESEHNFIDWFLQKMQSSEFRKILVSKVEEKKDDKELKNAVKNIKNFITGFEKNSVEGHRHRKVYFENIKSDITKDNQLDSIKKKIPSVCLSNLLGHLSNLQWKNLHRYLAKNPKQFDEQTFGNEFLRMLKNFRHLKGSQESLAVRNLIQQLEQSQDYISILEKTPPEITIPPYEARTNTGMEKDQSLLLNPEKLNNLYPNWRNLIPGIIDAHPFLEKDLEHTKLRDRKRIISPSKQDEKRDSYILQRYLDLNKKIDKFKIKKQLSFLGQGKQLPANLIETQKEMETHFNSSLVSVLIQIASAYNKEREDAAQGIWFDNAFSLCELSNINPPRKQKILPLLVGAILSEDFINNKDKWAKFKIFWNTHKIGRTSLKSKCKEIEEARKNSGNAFKIDYEEALNHPEHSNNKALIKIIQTIPDIIQAIQSHLGHNDSQALIYHNPFSLSQLYTILETKRDGFHKNCVAVTCENYWRSQKTEIDPEISYASRLPADSVRPFDGVLARMMQRLAYEIAMAKWEQIKHIPDNSSLLIPIYLEQNRFEFEESFKKIKGSSSDKTLEQAIEKQNIQWEEKFQRIINASMNICPYKGASIGGQGEIDHIYPRSLSKKHFGVIFNSEVNLIYCSSQGNREKKEEHYLLEHLSPLYLKHQFGTDNVSDIKNFISQNVANIKKYISFHLLTPEQQKAARHALFLDYDDEAFKTITKFLMSQQKARVNGTQKFLGKQIMEFLSTLADSKQLQLEFSIKQITAEEVHDHRELLSKQEPKLVKSRQQSFPSHAIDATLTMSIGLKEFPQFSQELDNSWFINHLMPDEVHLNPVRSKEKYNKPNISSTPLFKDSLYAERFIPVWVKGETFAIGFSEKDLFEIKPSNKEKLFTLLKTYSTKNPGESLQELQAKSKAKWLYFPINKTLALEFLHHYFHKEIVTPDDTTVCHFINSLRYYTKKESITVKILKEPMPVLSVKFESSKKNVLGSFKHTIALPATKDWERLFNHPNFLALKANPAPNPKEFNEFIRKYFLSDNNPNSDIPNNGHNIKPQKHKAVRKVFSLPVIPGNAGTMMRIRRKDNKGQPLYQLQTIDDTPSMGIQINEDRLVKQEVLMDAYKTRNLSTIDGINNSEGQAYATFDNWLTLPVSTFKPEIIKLEMKPHSKTRRYIRITQSLADFIKTIDEALMIKPSDSIDDPLNMPNEIVCKNKLFGNELKPRDGKMKIVSTGKIVTYEFESDSTPQWIQTLYVTQLKKQP

SEQ ID NO: 23 - protein, 1122 aa, Streptococcus thermophilus
MSDLVLGLDIGIGSVGVGILNKVTGEIIHKNSRIFPAAQAENNLVRRTNRQGRRLTRRKKHRIVRLNRLFEESGLITDFTKISINLNPYQLRVKGLTDELSNEELFIALKNMVKHRGISYLDDASDDGNSSVGDYAQIVKENSKQLETKTPGQIQLERYQTYGQLRGDFTVEKDGKKHRLINVFPTSAYRSEALRILQTQQEFNSQITDEFINRYLEILTGKRKYYHGPGNEKSRTDYGRYRTNGETLDNIFGILIGKCTFYPDEFRAAKASYTAQEFNLLNDLNNLTVPTETKKLSKEQKNQIINYVKNEKVMGPAKLFKYIAKLLSCDVADIKGHRIDKSGKAEIHTFEAYRKMKTLETLDIEQMDRETLDKLAYVLTLNTEREGIQEALEHEFADGSFSQKQVDELVQFRKANSSIFGKGWHNFSVKLMMELIPELYETSEEQMTILTRLGKQKTTSSSNKTKYIDEKLLTEEIYNPVVAKSVRQAIKIVNAAIKEYGDFDNIVIEMARETNEDDEKKAIQKIQKANKDEKDAAMLKAANQYNGKAELPHSVFHGHKQLATKIRLWHQQGERCLYTGKTISIHDLINNPNQFEVDHILPLSITFDDSLANKVLVYATANQEKGQRTPYQALDSMDDAWSFRELKAFVRESKTLSNKKKEYLLTEEDISKFDVRKKFIERNLVDTRYASRVVLNALQEHFRAHKIDTKVSVVRGQFTSQLRRHWGIEKTRDTYHHHAVDALIIAASSQLNLWKKQKNTLVSYSEEQLLDIETGELISDDEYKESVFKAPYQHFVDTLKSKEFEDSILFSYQVDSKFNRKISDATIYATRQAKVGKDKKDETYVLGKIKDIYTQDGYDAFMKIYKKDKSKFLMYRHDPQTFEKVIEPILENYPNKEMNEKGKEVPCNPFLKYKEEHGYIRKYSKKGNGPEIKSLKYYDSKLLGNPIDITPENSKNKVVLQSLKPWRTDVYFNKNTGKYEILGLKYADLQFEKKTGTYKISQEKYNGIMKEEGVDSDSEFKFTLYKNDLLLVKDTETKEQQLFRFLSRTMPNVKYYVELKPYSKDKFEKNESLIEILGSADKSGRCIKGLGKSNISIYKVRTDVLGNQHIIKNEGDKPKLDF

SEQ ID NO: 24 - protein, 1128 aa, Streptococcus thermophilus
MSDLVLGLDIGIGSVGVGILNKVTGEIIHKNSRIFPAAQAENNLVRRTNRQGRRLTRRKKHRIVRLNRLFEESGLITDFTKISINLNPYQLRVKGLTDELSNEELFIALKNMVKHRGISYLDDASDDGNSSVGDYAQIVKENSKQLETKTPGQIQLERYQTYGQLRGDFTVEKDGKKHRLINVFPTSAYRSEALRILQTQQEFNPQITDEFINRYLEILTGKRKYYHGPGNEKSRTDYGRYRTSGETLDNIFGILIGKCTFYPEEFRAAKASYTAQEFNLLNDLNNLTVPTETKKLSKEQKNQIINYVKNEKAMGPAKLFKYIAKLLSCDVADIKGYRIDKSGKAEIHTFEAYRKMKTLETLDIEQMDRETLDKLAYVLTLNTEREGIQEALEHEFADGSFSQKQVDELVQFRKANSSIFGKGWHNFSVKLMMELIPELYETSEEQMTILTRLGKQKRLRLQIKQNISNKTKYIDEKLLTEEIYNPVVAKSVRQAIKIVNAAIKEYGDFDNIVIEMARETNEDDEKKAIQKIQKANKDEKDAAMLKAANQYNGKAELPHSVFHGHKQLATKIRLWHQQGERCLYTGKTISIHDLINNPNQFEVDHILPLSITFDDSLANKVLVYATANQEKGQRTPYQALDSMDDAWSFRELKAFVRESKTLSNKKKEYLLTEEDISKFDVRKKFIERNLVDTRYASRVVLNALQEHFRAHKIDTKVSVVRGQFTSQLRRHWGIEKTRDTYHHHAVDALIIAASSQLNLWKKQKNTLVSYSEEQLLDIETGELISDDEYKESVFKAPYQHFVDTLKSKEFEDSILFSYQVDSKFNRKISDATIYATRQAKVGKDKKDETYVLGKIKDIYTQDGYDAFMKIYKKDKSKFLMYRHDPQTFEKVIEPILENYPNKQMNEKGKEVPCNPFLKYKEEHGYIRKYSKKGNGPEIKSLKYYDSKLLGNPIDITPENSKNKVVLQSLKPWRTDVYFNKATGKYEILGLKYADLQFEKGTGTYKISQEKYNDIKKKEGVDSDSEFKFTLYKNDLLLVKDTETKEQQLFRFLSRTLPKQKHYVELKPYDKQKFEGGEALIKVLGNVANGGQCIKGLAKSNISIYKVRTDVLGNQHIIKNEGDKPKLDF

SEQ ID NO: 25 - protein, 1123 aa, Francisella tularensis
MNVKILPIAIDLDVKNTGVFSAFYQKGTSLEKLDNKNGKVYELSKDSYTLLMNNRTARRHKRRGIDRKQLVKRLFKLVWTEQLNLEWDKDTQQAISFLFNRRGFSFITDGYSTEYLNIVPEQVKAILMDIFDDYNGEDDLDSYLKLATEQESKISEIYNKLMQKILEFKLRKLCTDIKDDKVSTKTLKEITSYEFELLADYLANYSESLKTQKFSYTDKQGNLKELSYYHHDKYNIQEFLKRHATINDEILGTLLTDDFDIWNFNFEKFDFDKNEEKLQNQEDKDHTQAHLHHFVFVVNKIKSEMASGGRHRSQYFQEITNVLDENNHQEGYLKNFCENLHNKKYSNLSVKNLVNLVGNLSNLELKPLRKYFNDKIHAKADHWDEQKFTETYCHWILGEWRVGVKDQDKKDGAKYSYKDLCNELKQKVTKAGLIDFLLELDPCRTIPPYLDNNNRKPPKCQSLILNPKFLDNQYPNWQQYLQELKKLQSIQDYLDSFETDLKDLKSSKDQPYFVEYKSSNQQMASGQRDYKDLDARILQFIFDRVKASDELLLNEIYFQAKKLKQKASSELEKLESSKKLDEVIANSQLSQILKSQHTNGIFEQGTFLHLVCKYYKQRQRARDSRLYIMPEYRYDKKLDKYNNTGRFDDNNQLLTYCNHKPRQKRYQLLNDLAGVLQVSRNQLLSSVEEWFQQAQRVGEISKSQDEQIFEWLKSFKIASYCKAAVEMQKQYRGTLKNAIQTAIFRQSENINKNKNTGNQQQALSENSKDVKSLTADEKKLLKLIENIAKASQKIGESLGLNDKQIKKFNSIYSFAQIQQIAFAKRKGNANTCAVCSADNAHRMQQIKITELVEDNKDNIILSAKAQRLPAIPTRIVDGAVKKMATILAKNIVDDNWQNIKQVLSAKHQLHIPIITESNAFEFEPALADVKGKSLKDRRKKALERISPENIFKDKNNRIKEFAKGISAYSGANLTDGDFDGAKEELDHIIPRSHKKYGTLNDEANLICVTRDDNKNIFAIDTSKWFEIETPSDLRDIGVATIQYKIDNNSRPKVRVKLDYVIDDDSKINYFMNHSLLKSRYPDKVLEILKQSTIIEFESSGFNKTIKEMLGMTLAGIYNETSNN

SEQ ID NO: 26 - protein, 1436 aa, Bacteroides fragilis
MKRILGLDLGTNSIGWALVNEAENKDERSSIVKLGVRVNPLTVDELTNFEKGKSITTNADRTLKRGMRRNLQRYKLRRETLTEVLKEHKLITEDTILSENGNRTTFETYRLRAKAVTEEISLEEFARVLLMINKKRGYKSSRKAKGVEEGTLIDGMDIARELYNNNLTPGELCLQLLDAGKKFLPDFYRSDLQNELDRIWEKQKEYYPEILTDVLKEELRGKKRDAVWAICAKYFVWKENYTEWNKEKGKTEQQEREHKLEGIYSKRKRDEAKRENLQWRVNGLKEKLSLEQLVIVFQEMNTQINNSSGYLGAISDRSKELYFNKQTVGQYQMEMLDKNPNASLRNMVFYRQDYLDEFNMLWEKQAVYHKELTEELKKEIRDIIIFYQRRLKSQKGLIGFCEFESRQIEVDIDGKKKIKTVGNRVISRSSPLFQEFKIWQILNNIEVTVVGKKRKRRKLKENYSALFEELNDAEQLELNGSRRLCQEEKELLAQELFIRDKMTKSEVLKLLFDNPQELDLNFKTIDGNKTGYALFQAYSKMIEMSGHEPVDFKKPVEKVVEYIKAVFDLLNWNTDILGFNSNEELDNQPYYKLWHLLYSFEGDNTPTGNGRLIQKMTELYGFEKEYATILANVSFQDDYGSLSAKAIHKILPHLKEGNRYDVACVYAGYRHSESSLTREEIANKVLKDRLMLLPKNSLHNPVVEKILNQMVNVINVIIDIYGKPDEIRVELARELKKNAKEREELTKSIAQTTKAHEEYKTLLQTEFGLTNVSRTDILRYKLYKELESCGYKTLYSNTYISREKLFSKEFDIEHIIPQARLFDDSFSNKTLEARSVNIEKGNKTAYDFVKEKFGESGADNSLEHYLNNIEDLFKSGKISKTKYNKLKMAEQDIPDGFIERDLRNTQYIAKKALSMLNEISHRVVATSGSVTDKLREDWQLIDVMKELNWEKYKALGLVEYFEDRDGRQIGRIKDWTKRNDHRHHAMDALTVAFTKDVFIQYFNNKNASLDPNANEHAIKNKYFQNGRAIAPMPLREFRAEAKKHLENTLISIKAKNKVITGNINKTRKKGGVNKNMQQTPRGQLHLETIYGSGKQYLTKEEKVNASFDMRKIGTVSKSAYRDALLKRLYENDNDPKKAFAGKNSLDKQPIWLDKEQMRKVPEKVKIVTLEAIYTIRKEISPDLKVDKVIDVGVRKILIDRLNEYGNDAKKAFSNLDKNPIWLNKEKGISIKRVTISGISNAQSLHVKKDKDGKPILDENGRNIPVDFVNTGNNHHVAVYYRPVIDKRGQLVVDEAGNPKYELEEVVVSFFEAVTRANLGLPIIDKDYKTTEGWQFLFSMKQNEYFVFPNEKTGFNPKEIDLLDVENYGLISPNLFRVQKFSLKNYVFRHHLETTIKDTSSILRGITWIDFRSSKGLDTIVKVRVNHIGQIVSVGEY

SEQ ID NO: 27 - protein, 1314 aa, Mycoplasma synoviae
MLRLYCANNLVLNNVQNLWKYLLLLIFDKKIIFLFKIKVILIRRYMENNNKEKIVIGFDLGVASVGWSIVNAETKEVIDLGVRLFSEPEKADYRRAKRTTRRLLRRKKFKREKFHKLILKNAEIFGLQSRNEILNVYKDQSSKYRNILKLKINALKEEIKPSELVWILRDYLQNRGYFYKNEKLTDEFVSNSFPSKKLHEHYEKYGFFRGSVKLDNKLDNKKDKAKEKDEEEESDAKKESEELIFSNKQWINEIVKVFENQSYLTESFKEEYLKLFNYVRPFNKGPGSKNSRTAYGVFSTDIDPETNKFKDYSNIWDKTIGKCSLFEEEIRAPKNLPSALIFNLQNEICTIKNEFTEFKNWWLNAEQKSEILKFVFTELFNWKDKKYSDKKFNKNLQDKIKKYLLNFALENFNLNEEILKNRDLENDTVLGLKGVKYYEKSNATADAALEFSSLKPLYVFIKFLKEKKLDLNYLLGLENTEILYFLDSIYLAISYSSDLKERNEWFKKLLKELYPKIKNNNLEIIENVEDIFEITDQEKFESFSKTHSLSREAFNHIIPLLLSNNEGKNYESLKHSNEELKKRTEKAELKAQQNQKYLKDNFLKEALVPLSVKTSVLQAIKIFNQIIKNFGKKYEISQVVIEMARELTKPNLEKLLNNATNSNIKILKEKLDQTEKFDDFTKKKFIDKIENSVVFRNKLFLWFEQDRKDPYTQLDIKINEIEDETEIDHVIPYSKSADDSWFNKLLVKKSTNQLKKNKTVWEYYQNESDPEAKWNKFVAWAKRIYLVQKSDKESKDNSEKNSIFKNKKPNLKFKNITKKLFDPYKDLGFLARNLNDTRYATKVFRDQLNNYSKHHSKDDENKLFKVVCMNGSITSFLRKSMWRKNEEQVYRFNFWKKDRDQFFHHAVDASIIAIFSLLTKTLYNKLRVYESYDVQRREDGVYLINKETGEVKKADKDYWKDQHNFLKIRENAIEIKNVLNNVDFQNQVRYSRKANTKLNTQLFNETLYGVKEFENNFYKLEKVNLFSRKDLRKFILEDLNEESEKNKKNENGSRKRILTEKYIVDEILQILENEEFKDSKSDINALNKYMDSLPSKFSEFFSQDFINKCKKENSLILTFDAIKHNDPKKVIKIKNLKFFREDATLKNKQAVHKDSKNQIKSFYESYKCVGFIWLKNKNDLEESIFVPINSRVIHFGDKDKDIFDFDSYNKEKLLNEINLKRPENKKFNSINEIEFVKFVKPGALLLNFENQQIYYISTLESSSLRAKIKLLNKMDKGKAVSMKKITNPDEYKIIEHVNPLGINLNWTKKLENNN

SEQ ID NO: 28 - protein, 1368 aa, Streptococcus pyogenes
MDKKYSIGLDIGTNSVGWAVITDDYKVPSKKFKVLGNTDRHSIKKNLIGALLFDSGETAEATRLKRTARRRYTRRKNRICYLQEIFSNEMAKVDDSFFHRLEESFLVEEDKKHERHPIFGNIVDEVAYHEKYPTIYHLRKKLVDSTDKADLRLIYLALAHMIKFRGHFLIEGDLNPDNSDVDKLFIQLVQTYNQLFEENPINASGVDAKAILSARLSKSRRLENLIAQLPGEKKNGLFGNLIALSLGLTPNFKSNFDLAEDAKLQLSKDTYDDDLDNLLAQIGDQYADLFLAAKNLSDAILLSDILRLNSEITKAPLSASMIKRYDEHHQDLTLLKALVRQQLPEKYKEIFFDQSKNGYAGYIDGGASQEEFYKFIKPILEKMDGTEELLAKLNREDLLRKQRTFDNGSIPHQIHLGELHAILRRQEDFYPFLKDNREKIEKILTFRIPYYVGPLARGNSRFAWMTRKSEETITPWNFEEVVDKGASAQSFIERMTNFDKNLPNEKVLPKHSLLYEYFTVYNELTKVKYVTEGMRKPAFLSGEQKKAIVDLLFKTNRKVTVKQLKEDYFKKIECFDSVEISGVEDRFNASLGTYHDLLKIIKDKDFLDNEENEDILEDIVLTLTLFEDREMIEERLKTYAHLFDDKVMKQLKRRRYTGWGRLSRKLINGIRDKQSGKTILDFLKSDGFANRNFMQLIHDDSLTFKEDIQKAQVSGQGDSLHEHIANLAGSPAIKKGILQTVKVVDELVKVMGRHKPENIVIEMARENQTTQKGQKNSRERMKRIEEGIKELGSQILKEHPVENTQLQNEKLYLYYLQNGRDMYVDQELDINRLSDYDVDHIVPQSFIKDDSIDNKVLTRSDKNRGKSNNVPSEEVVKKMKNYWRQLLNAKLITQRKFDNLTKAERGGLSELDKAGFIKRQLVETRQITKHVAQILDSRMNTKYDENDKLIREVKVITLKSKLVSDFRKDFQFYKVREINNYHHAHDAYLNAVVGTALIKKYPKLESEFVYGDYKVYDVRKMIAKSEQEIGKATAKYFFYSNIMNFFKTEITLANGEIRKRPLIETNGETGEIVWDKGRDFATVRKVLSMPQVNIVKKTEVQTGGFSKESILPKRNSDKLIARKKDWDPKKYGGFDSPTVAYSVLVVAKVEKGKSKKLKSVKELLGITIMERSSFEKNPIDFLEAKGYKEVRKDLIVKLPKYSLFELENGRKRMLASAGELQKGNELALPSKYVNFLYLASHYEKLKGSPEDNEQKQLFVEQHKHYLDEIIEQISEFSKRVILADANLDKVLSAYNKHRDKPIREQAENIIHLFTLTNLGAPAAFKYFDTTIDRKRYTSTKEVLDATFIHQSITGLYETRIDLSQLGGD

SEQ ID NO: 29 - protein, 1368 aa, Streptococcus pyogenes
MDKKYSIGLDIGTNSVGWAVITDDYKVPSKKFKVLGNTDRHSIKKNLIGALLFDSGETAEATRLKRTARRRYTRRKNRICYLQEIFSNEMAKVDDSFFHRLEESFLVEEDKKHERHPIFGNIVDEVAYHEKYPTIYHLRKKLVDSTDKADLRLIYLALAHMIKFRGHFLIEGDLNPDNSDVDKLFIQLVQTYNQLFEENPINASGVDAKAILSARLSKSRRLENLIAQLPGEKKNGLFGNLIALSLGLTPNFKSNFDLAEDAKLQLSKDTYDDDLDNLLAQIGDQYADLFLAAKNLSDAILLSDILRVNTEITKAPLSASMIKRYDEHHQDLTLLKALVRQQLPEKYKEIFFDQSKNGYAGYIDGGASQEEFYKFIKPILEKMDGTEELLVKLNREDLLRKQRTFDNGSIPHQIHLGELHAILRRQEDFYPFLKDNREKIEKILTFRIPYYVGPLARGNSRFAWMTRKSEETITPWNFEEVVDKGASAQSFIERMTNFDKNLPNEKVLPKHSLLYEYFTVYNELTKVKYVTEGMRKPAFLSGEQKKAIVDLLFKTNRKVTVKQLKEDYFKKIECFDSVEISGVEDRFNASLGTYHDLLKIIKDKDFLDNEENEDILEDIVLTLTLFEDREMIEERLKTYAHLFDDKVMKQLKRRRYTGWGRLSRKLINGIRDKQSGKTILDFLKSDGFANRNFMQLIHDDSLTFKEDIQKAQVSGQGDSLHEHIANLAGSPAIKKGILQTVKVVDELVKVMGRHKPENIVIEMARENQTTQKGQKNSRERMKRIEEGIKELGSQILKEHPVENTQLQNEKLYLYYLQNGRDMYVDQELDINRLSDYDVDHIVPQSFLKDDSIDNKVLTRSDKNRGKSDNVPSEEVVKKMKNYWRQLLNAKLITQRKFDNLTKAERGGLSELDKAGFIKRQLVETRQITKHVAQILDSRMNTKYDENDKLIREVKVITLKSKLVSDFRKDFQFYKVREINNYHHAHDAYLNAVVGTALIKKYPKLESEFVYGDYKVYDVRKMIAKSEQEIGKATAKYFFYSNIMNFFKTEITLANGEIRKRPLIETNGETGEIVWDKGRDFATVRKVLSMPQVNIVKKTEVQTGGFSKESILPKRNSDKLIARKKDWDPKKYGGFDSPTVAYSVLVVAKVEKGKSKKLKSVKELLGITIMERSSFEKNPIDFLEAKGYKEVKKDLIIKLPKYSLFELENGRKRMLASAGELQKGNELALPSKYVNFLYLASHYEKLKGSPEDNEQKQLFVEQHKHYLDEIIEQISEFSKRVILADANLDKVLSAYNKHRDKPIREQAENIIHLFTLTNLGAPAAFKYFDTTIDRKRYTSTKEVLDATLIHQSITGLYETRIDLSQLGGD

SEQ ID NO: 30 - protein, 1370 aa, Streptococcus agalactiae; identical to SEQ ID NO: 11

SEQ ID NO: 31 - protein, 1173 aa, Rhodospirillum rubrum
MRPIEPWILGLDIGTDSLGWAVFSCEEKGPPTAKELLGGGVRLFDSGRDAKDHTSRQAERGAFRRARRQTRTWPWRRDRLIALFQAAGLTPPAAETRQIALALRREAVSRPLAPDALWAALLHLAHHRGFRSNRIDKRERAAAKALAKAKPAKATAKATAPAKEADDEAGFWEGAEAALRQRMAASGAPTVGALLADDLDRGQPVRMRYNQSDRDGVVAPTRALIAEELAEIVARQSSAYPGLDWPAVTRLVLDQRPLRSKGAGPCAFLPGEDRALRALPTVQDFIIRQTLANLRLPSTSADEPRPLTDEEHAKALALLSTARFVEWPALRRALGLKRGVKFTAETERNGAKQAARGTAGNLTEAILAPLIPGWSGWDLDRKDRVFSDLWAARQDRSALLALIGDPRGPTRVTEDETAEAVADAIQIVLPTGRASLSAKAARAIAQAMAPGIGYDEAVTLALGLHHSHRPRQERLARLPYYAAALPDVGLDGDPVGPPPAEDDGAAAEAYYGRIGNISVHIALNETRKIVNALLHRHGPILRLVMVETTRELKAGADERKRMIAEQAERERENAEIDVELRKSDRWMANARERRQRVRLARRQNNLCPYTSTPIGHADLLGDAYDIDHVIPLARGGRDSLDNMVLCQSDANKTKGDKTPWEAFHDKPGWIAQRDDFLARLDPQTAKALAWRFADDAGERVARKSAEDEDQGFLPRQLTDTGYIARVALRYLSLVTNEPNAVVATNGRLTGLLRLAWDITPGPAPRDLLPTPRDALRDDTAARRFLDGLTPPPLAKAVEGAVQARLAALGRSRVADAGLADALGLTLASLGGGGKNRADHRHHFIDAAMIAVTTRGLINQINQASGAGRILDLRKWPRTNFEPPYPTFRAEVMKQWDHIHPSIRPAHRDGGSLHAATVFGVRNRPDARVLVQRKPVEKLFLDANAKPLPADKIAEIIDGFASPRMAKRFKALLARYQAAHPEVPPALAALAVARDPAFGPRGMTANTVIAGRSDGDGEDAGLITPFRANPKAAVRTMGNAVYEVWEIQVKGRPRWTHRVLTRFDRTQPAPPPPPENARLVMRLRRGDLVYWPLESGDRLFLVKKMAVDGRLALWPARLATGKATALYAQLSCPNINLNGDQGYCVQSAEGIRKEKIRTTSCTALGRLRLSKKAT

SEQ ID NO: 32 - protein, 997 aa, Maritimibacter alkaliphilus
MKVLVDAGLMPSDPAAAKALETLDPYELRATGLDVMLPLTHLGRAVFHLNQRRGFKSNRKTDRGDNESGKIKDATKRLTWAMQEAGARTYGEFLHMRRARASDPRQVPSVRTRLSVASRGGPDSKEEAGYDFYPERAHLEDEFHALWSAQAAFHPDLTCELRDVVFEKIFYQRPLKEPKVGLCLFTAEERLPKAHPLTGRRVLYETVNQLRVTADGRTTRPLTLEERDMIVYALDNKKPVKSLSSMHLKLVALGKLVKLKDGERFTLESGVRDAIACDPIRATMGHPDGFGPAWSRLDWQAQWALIEKLRQVQSDDDFASLVAWLGATHNLSEDHAKRVANLHLPEGYGRLGLTATEAILCNLKAEVCTYSQAVERWGKHHSNQRTGECLEALPYYGEVLDRHVIPGTYNEDDDDVTRYGRITNPTVHIGLNQLRRLVNRIIATYGKPDQIVVELARELKQSEAQKSEALKKIRDTTADAIRRGRQLEEIGQKNTGANRLLLRLWEDLGPAVGPRCCPYTGKPISVTMLFDGACDVDHILPYSRTLDDSFANRTICLREANRQKGDRTPWEAWGGSDQWDAIEANLKDLPENKRKRFAPDAMERFEGERDFLDRALVDTQYLARISRAYLDTLFTEGGHVWVVPGRMTEMLRRHWGLNALLSDKDRGAGKVKNRTDHRHHAIDAAVIAATDHSLVNRISKAAGQGESAGQSAELIARDTPEPWEGFRNDISAQIARIVVSHRADHGRIDVEGRKHGKDSTAGRLHNDTAYGIVDDHTVVSRTPLLSLKPGDIEVTTKGKNIRDTQLQKALSVATTGKDGKGFEEALRNFAEKEGPYQGIRRVRLIETLQSSARVEVGSDEDGQPLKAYKGDSNHCYDLWKLPDGKVVPHVVSTYEAHAGTDKRPHPAAKRILRVFKKDMVAIEQDDQTAIFYVQKLDRANGLFLAPHLEANADARHRNPNDAFKFLQMGAGSVVRNKLRRVYVDEIGRIKDPGPPKH

SEQ ID NO: 33 - protein, 1027 aa, Blastopirellula marina
MFSESGDQPSLVDCGVRIFPEGVERDQQGGEKSKSQSRRVARGIRRQVRRRAQRLRHLKHALITTGLFPADVVDQQEVLASNPYELRSRALSEKLEPYEIGRILLHLAKRRGFLSNRTTDRSGGNELKGILAEMTQLQGEIAAHGCQTLGQYLHQLGDDGETFAQRLRGRHTLRAMYEDEFEKIWERQASYYPALLTEELRGGEEGKQSYPLVPTARRKSESLLKRFGLHGLLFFQRKMYWPKSVIGRCDLEPKEKRCPKADRLAQRFRILQEVNNLRLISPADRKEYTFAEFVGAGADKKLVDYLCEAKERTFPQIRKKFKLPETISFNYERGERSKLQGHETDAHFNGKKGLGKRRWSEIAEDVKDHIIQIVLEEDREDVALRKLTQDCSLTVEEAHKAMALHLPAGYSQYSRVAISRLLPHLELGKLLMGNDASDSAMHAAGYLRPDEREVRQYDLLPEPPDIPNPLVRQALYEVRKVINAIIREYGALGTIRVELAREAKKSAEQRTQIRIANAKRERENAAIAKTLQEMSPAIRPTRRNIQRYLLWKDQGGVCIYTGKVISQAQLFDSGEVDVDHILPRWRSLDDSMANKVIAHRSANNEKGDRTPWEWLGHDKPRFDELLLRAQRLPYGKRQRFIQKEVELTNFVERQLRDTTYVSRLVVQYLKGLGVPITTVKGPMTAELRHHWGLNALLNEDGSQKKNRSDHRHHAIDAIVIGLTDAKRLHALANARGKDLQPPWSEFRSDVATALGRMAVSHRVRRRIQGALHEETIYGPTQKAAQPTSTDQRPWAKDWIEDSQIVVRRKSVSDLTNTKHLAKIRDVTIRKILEDHLRRQKVDPTKPGVIPKDAFAGSNAPQMPSGVPIKKVRLVERGETWRKIGSGEASKFIKPGSNHHISYFAISRKGRESWKAHVTIMLDAACIAKESINNGKIVNRSIGDQGRFLMSLSIGEMFEITNNGGEILLCVVRKIDQSGRIYYKIHDDARESMDLKKDNLYMSPSKMQQFDARKVTVTPLGKIRNAND

SEQ ID NO: 34 - protein, 158 aa, Francisella tularensis
MIDFLLELDPCITIPPYLDNNNRKPPKCQSLILNPKFLDNQYPNWQQYLQELKKLQSIQDYLDSFETDLKDLKSSKDQPYFVEYKSSNQQMASGQRDYKDLDARILQFIFDRVKASDELLLSEIYFQAKKLKQKASSELEKLESSKKLDEVIANSQLS

SEQ ID NO: 35 - protein, 393 aa, Francisella tularensis
MNVKILPIAIDLDVKNTGVFSAFYQKGTSLEKLDNKNGKVYELSKDSYTLLMNNRTAQRHQRRGIDRKQLVKRLFKLVWTEQLNLEWDKDTQQAISFLFNRRGFSFITDGYSTEYLNIVPEQVKAILMDIFDDYNGEDDLDSYLKLATEQESKISEIYNKLMQKILEFKLRKLCTDIKDDKVSTKTLKEITSYEFELLADYLANYSESLKTQKFSYTDKQGNLKELSYYHHDKYNIQEFLKRHATINDEILDTLLTDDFDIWNFNFEKFDFDKNEEKLQSQEDKDHTQAYFHHFVFAVNKIKSEMASGGRHRSQYFQEITNVLDENNHQEGYLKNFCENLHNKKYSNLSVKNLVNLVGNLSNLELKPLRKYFNDKNLIIGMSKSLQKLIATGY

SEQ ID NO: 36 - protein, 1066 aa, Rhodopseudomonas palustris
MSERVVRRILGIDLGIASCGWGVVDISGAGGGIIATGVRCFDAPLIDKTGEPKSATRRTARGQRRIVRRRRQRMNGVRRLLCEFGLLPDPRPDALNQAMRRISTASAAAQVTPWTLRAAAHQRLLSNEELAVVLGHIARHRGFRSNAKNEAGANAADETSKMKKAMEATREGLAKYHAFGDMIANDPKFANRKRNRDKDYSHTAKRSDLEDEVRAILRAQLRFGSAAATETLAQTFADVAFFQRPLQDSEDRVGDCPFEPGQKRAARRAPSFELFRFLSRLANLKLAVGRSPERRLTAEEIALAAKGFGETKKTITFKSLREALDLDPNARFSGIGKDKEASLDVVARTGGAAYGTKTLKDALGDAPWRSLSRTPETLDRIAEILSFREDITSIRNGLEDLGLDSLVVEALMQAAANGDFKEFTRAGHISARAARNIIPGLREGLVYSEACARVGYDHAARLSVPLDQVGSPVTRKALSEALKQVRAVAREYGPIDYFHIELARSVGKSAEERKQLTDGIEARNVEKAKRRKQAEEHLGRAPSDDELLRYELAKEQNFKCIYSGDAIDPAGVAANDTRYQVDHILPWSRFGDDSYLNKTLCTARSNQNKRGRTPFEWFEADKTDVEWMEYVARVENLQEVKGRKKRNYSIKDAAAIEDKFKARNLTDTQWATRLLADELSRMFPPRECERAICGRADGGNDGLTIVEERRVFTRPGAITSKLRRAWGLEGLKKQDGKRVEDDRHHAVDALVLAATTESLLQRLTVEVQRREREGRPDDIFHCAEPWRGFRADVRRTVYGSETMPGIFVSRAERRRARGKAHDATIKQIREIEGERLVFERKPVEKLTDKDLEKIPIPKPYGQVSDPKRLRDELVESLRAWIAAGKPKDRPPLSPKGDVIRKVRIQTNDKVSVEINGGTVDRGDMARVDVFRKKNKKAVWEYYVVPIYPHQIVALNDPPDRAVIAYAEDKDWKEIDSSYEFLWSLFGLSYVEISKANGECIDGYFRGLHRGTGAASVCKHISLGKDATVSGIGLKTLASFKKFTIDRLGRKFEIPREVRTWRGEACT

SEQ ID NO: 37 - protein, 1149 aa, Lactobacillus salivarius
MERYHIGLDIGTSSIGWAVIGDDFKIKRKKGKNLIGVRLFKEGDTAAERRGFRTQRRRLNRRKWRLKLLEEIFDPYMAEVDKYFFARLKESNLSPKDSNKKYLGSLLFPDISDSNFYDKYPTIYHLRRDLMEKDKKFDLREIYLAIHHIVKYRGNFLEKVPAKNYKNSGASIGFLLEEVNDLYGNIIGNEDVAILDNDKFEDVEKIILNDEIRNIDKQKNVGRLLVKDKKEKNIVTAFSKAIFGYKFNLEDLLLIESDEKNKLTFNDENIDDIFNELSHSLNDNQMDLLTKTREIYFKFKLNMIVPTGYTISESMIEKYEMHKAHLKMYKEFINTLNAKDRKILKNAYSDYINNEKAKAANAQENFYKTVKKTIKENDSDTAKKIIGLIDEGNFMPKQRTGENGVIPHQLHQIELDRIIENQAKYYPWLAEENPVEKNRKFAKYKLDELVTFRVPYYVGPLIDKTESNKNEKETKFAWMVRKAKGTITPWNFENLVDRTESANRFIKRMTSKDTYIIGEDVLPASSLLYEKYKVLNELNNIKVNKKKLDVEQKQHVYLDLFTTRKNVTKDDLATSLNCDVESITGLTDNKKFNSSLSSYIDLKAILGNIVDDYSKNEDLEKIIEYSTIFEDGNIYKEKLSEISWLTDEQIEKLSNIHFKGWGRLSKKLLTQITNENGERIIDTLWNTSNNFIQVISDESIQAKLAEINGEYANKYNLEDILDEAYTSPQNKKAIRQVMKVVEDIEKAMKCEPTSIAIEFTREKRKSKLTNTRYKKISETYEKITDELISEYELGKLQSELDSKVNNMRDRYYLYFMQLGRDMYTGEKMNIDELHQKYDIDHILPQSFIKDDSLNNRVLTSKSVNIKEKSDKTAADLYAAKMGDFWRKLRKQGLMTEQKYKNLLTRTDSINKYTKQSFIKRQLVETSQVVKLAANILQDKYRNTKIIEIRARLNSDLRKKYELIKNREVNDYHHAIDGYLTTFVGQYLYKVYPKLRSYFVYDDFKKLDSNYLKHMDKFNFIWKLEDKKAEDVYDKVNDEFVLNVPEMKEYIRKIYNYKYMLVSKEVTTKNGAFYDQTKYNAKTINLIPIKKDKPTNIYGGYKGKVSSYMMLVKIQKKKEVIYKFVGVPRLWTDELDRLIDTDEKKALLKK

SEQ ID NO: 38 - protein, 1064 aa, Rhodopseudomonas palustris
MSECVTRRILGIDLGIASCGWGVIEVGEASGSIIASGVRCFDAPLIDKTGEPKSATRRTARGQRRIIRRRRQRMNAVRRLLAEFGVLTGRSPDALHQALLRLSQSVAGSQVTPWTLRAAAHERKLTNDELAVVLGHIARHRGFRSNSKNDGGANAADETSKMKKAMETTREGLARYHSFGAMIASDPKFADRKRNRDKDYSHTAKRSDLEDEVRTIFRSQTRFGSLVASEKLSQAFADAAFFQRPLQDSEDMVGSCPFEPGQKRTARRAPSFELFRFLSRLANLKLTVGRAPERRLTPDEIALAAKGFGETKKSITFKSLREALDLDPNARFSGVAKEKESTLDVAARTGGAAYGTKTLKDALGDAPWRSLSRMPEKLDRIAEILSFREDMKAIRNGLEEVGLDGLVVDALMQATANGDFKDFTRAAHISALAARNIIPGLREGLVYSDACTRVGYDHAARPAVPLSQIGSPVTRKALSEALKQVRAVAREYGPIDYFHIELARSIGKSAEERKKLTDGIEARNVEKEKRRKEAAEHLGRAPSDDELLRYELAKEQNFKCIYSGDPIDPAGISANDTRYQVDHILPWSRFGDDSYVNKTLCTARSNQNKRGRTPFEWFDADKTEAEWMEYSARVEDLKEVKGRKKRNYSIKDAASVEDKFKARNLTDTQWATRLLADELKRMFPPRECERVVTVRADGGNDGLSIVEERRVFTRPGAITSKLRRAWGLEGLKKQDGKRVEDDRHHAVDALVLAATTESLLNRLTVEVQQREREGRQDDIFHCSQPWPGFRVDVQRTVYGSETMPGIFVSRAERRRARGKAHDATVKQIRDIDGERIVFERKPIEKLTDKDLERIPVPEPYGKAADPKKLRDELVENLRAWIAAGKPKDKPPRSPKGDIIRKVRIETKDKVAVEINGGTVDRGDMARVDVFRKKNKKGVWEFYVIPIYPHQIVASALPPNRAVIAYKAESEWTAIDGCFEFAWSLNPMSYLELVKSNGELIEGYFRSMDRTTGAINLSPMSTNSETIRSIGVKTLSSFRKFTVDRLGRKFEIPREVRTWRGEACT

SEQ ID NO: 39 - protein, 1166 aa, Nitrobacter hamburgensis
MHVEIDFPHFSRGDSHLAMNKNEILRGSSVLYRLGLDLGSNSLGWFVTHLEKRGDRHEPVALGPGGVRIFPDGRDPQSGTSNAVDRRMARGARKRRDRFVERRKELIAALIKYNLLPDDARERRALEVLDPYALRKTALTDTLPAHHVGRALFHLNQRRGFQSNRKTDSKQSEDGAIKQAASRLATDKGNETLGVFFADMHLRKSYEDRQTAIRAELVRLGKDHLTGNARKKIWAKVRKRLFGDEVLPRADAPHGVRARATITGTKASYDYYPTRDMLRDEFNAIWAGQSAHHATITDEARTEIEHIIFYQRPLKPAIVGKCTLDPATRPFKEDPEGYRAPWSHPLAQRFRILSEARNLEIRDTGKGSRRLTKEQSDLVVAALLANREVKFDKLRTLLKLPAEARFNLESDRRAALDGDQTAARLSDKKGFNKAWRGFPPERQIAIVARLEETEDENELIAWLEKECALDGAAAARVANTTLPDGHCRLGLRAIKKIVPIMQDGLDEDGVAGAGYHIAAKRAGYDHAKLPTGEQLGRLPYYGQWLQDAVVGSGDARDQKEKQYGQFPNPTVHIGLGQLRRVVNDLIDKYGPPTEISIEFTRALKLSEQQKAERQREQRRNQDKNKARAEELAKFGRPANPRNLLKMRLWEELAHDPLDRKCVYTGEQISIERLLSDEVDIDHILPVAMTLDDSPANKIICMRYANRHKRKQTPSEAFGSSPTLQGHRYNWDDIAARATGLPRNKRWRFDANAREEFDKRGGFLARQLNETGWLARLAKQYLGAVTDPNQIWVVPGRLTSMLRGKWGLNGLLPSDNYAGVQDKAEEFLASTDDMEFSGVKNRADHRHHAIDGLVTALTDRSLLWKMANAYDEEHEKFVIEPPWPTMRDDLKAALEKMVVSHKPDHGIEGKLHEDSAYGFVKPLDATGLKEEEAGNLVYRKAIESLNENEVDRIRDIQLRTIVRDHVNVEKTKGVALADALRQLQAPSDDYPQFKHGLRHVRILKKEKGDYLVPIANRASGVAYKAYSAGENFCVEVFETAGGKWDGEAVRRFDANKKNAGPKIAHAPQWRDANEGAKLVMRIHKGDLIRLDHEGRARIMVVHRLDAAAGRFKLADHNETGNLDKRHATNNDIDPFRWLMASYNTLKKLAAVPVRVDELGRVWRVMPN

SEQ ID NO: 40 - protein, 641 aa, Nitrobacter hamburgensis
MHKRNSRSYRLGLDLGSNSLGWFVTHLEKRGDRYEPVALDPGGVRIFPDGRDPQSGMSNAVDRRMARGARKRRDRFVDPYALRKAALTNALPAHRVGRAIFHLNQRRGFQSNRKTDRKQSEDGAIKQAASKLKARMHEEAAPTLGAFFADMHLRKSYDDQQTAIRAELVRLGKDHLTGNARKKVWAKVRKRLFGDEVLRPKDTSDGARARATTTGTKASYDFYPTRAMLLDEFNAIWAAQREHHLAMTDEAKAEIEHIIFYHRPLKPAIVGKCTLDPATRPFKEDPEGYRAPWSHPLAQRFRILSEARNLEIRETGKTSRRLTKDQSDLVVAALLANREVKFDKLRTLLKLPAEARFNLESDRRSTATRPPHGCRTRRASIRRGAGFLRNGRSRSSPDWKKPKTKTNCSHGSKWNAHLTAQRPRASPIRRCRTAIAGSACAQSKRSCRSCRTSSMRMALRAPAITSWPSVPATTIPVDTFQQGGNAFGRILSVVTIELFAITDRVDPVQEQDARCFALRIAECRSDGLQHFAEVSLGLPPRNAAQDQRHSAGLCQSSCVGRFVPGTPCRRTPRSTSLHGKEPSAHAFGSTARSRPQLPASPRPCMSFRDGTSSSPARMPETLDRCAISRSNRSSVCRAERL

SEQ ID NO: 41 - protein, 1368 aa, Streptococcus pyogenes
MDKKYSIGLDIGTNSVGWAVITDDYKVPSKKFKVLGNTDRHSIKKNLIGALLFDSGEIAEATRLKRTARRRYTRRKNRICYLQEIFSNEMAKVDDSFFHRLEESFLVEEDKKHERHPIFGNIVDEVAYHEKYPTIYHLRKKLVDSTDKADLRLIYLALAHMIKFRGHFLIEGDLNPDNSDVDKLFIQLVQTYNQLFEENPINASGVDAKAILSARLSKSRRLENLIAQLPGEKKNGLFGNLIALSLGLTPNFKSNFDLAEDAKLQLSKDTYDDDLDNLLAQIGDQYADLFLAAKNLSDAILLSDILRLNSEITKAPLSASMIKRYDEHHQDLTLLKALVRQQLPEKYKEIFFDQSKNGYAGYIDGGASQEEFYKFIKPILEKMDGTEELLAKLNREDLLRKQRTFDNGSIPHQIHLGELHAILRRQEDFYPFLKDNREKIEKILTFRIPYYVGPLARGNSRFAWMTRKSEETITPWNFEEVVDKGASAQSFIERMTNFDKNLPNEKVLPKHSLLYEYFTVYNELTKVKYVTEGMRKPAFLSGEQKKAIVDLLFKTNRKVTVKQLKEDYFKKIECFDSVEISGVEDRFNASLGTYHDLLKIIKDKDFLDNEENEDILEDIVLTLTLFEDREMIEERLKTYAHLFDDKVMKQLKRRRYTVWGRLSRKLINGIRDKQSGKTILDFLKSDGFANRNFMQLIHDDSLTFKEDIQKAQVSGQGDSLHEHIANLAGSPAIKKGILQTVKVVDELVKVMGRHKPENIVIEMARENQTTQKGQKNSRERMKRIEEGIKELGSQILKEHPVENTQLQNEKLYLYYLQNGRDMYVDQELDINRLSDYDVDHIVPQSFIKDDSIDNKVLTRSDKNRGKSDNVPSEEVVKKMKNYWRQLLNAKLITQRKFDNLTKAERGGLSELDKAGFIKRQLVETRQITKHVAQILDSRMNTKYDENDKLIREVKVITLKSKLVSDFRKDFQFYKVREINNYHHAHDAYLNAVVGTALIKKYPKLESEFVYGDYKVYDVRKMLAKSEQEIGKATAKYFFYSNIMNFFKTEITLANGEIRKRPLIETNGETGEIVWDKGRDFATVRKVLSMPQVNIVKKTEVQTGGFSKESILPKRNSDKLIARKKDWDPKKYGGFDSPTVAYSVLVVAKVEKGKSKKLKSVKELLGITIMERSSFEKNPIDFLEAKGYKEVRKDLIIKLPKYSLFELENGRKRMLASAGELQKGNELALPSKYVNFLYLASHYEKLKGSPEDNEQKQLFVEQHKHYLDEIIEQISEFSKRVILADANLDKVLSAYNKHRDKPIREQAENIIHLFTLTNLGAPTAFKYFDTTIDRKRYTSTKEVLDATFIHQSITGLYETRIDLSQLGGD

SEQ ID NO: 42 - protein, 1368 aa, Streptococcus pyogenes
MDKKYSIGLDIGTNSVGWAVITDDYKVPSKKFKVLGNTDRHSIKKNLIGALLFDSGETAEATRLKRTARRRYTRRKNRICYLQEIFSNEMAKVDDSFFHRLEESFLVEEDKKHERHPIFGNIVDEVAYHEKYPTIYHLRKKLVDSTDKADLRLIYLALAHMIKFRGHFLIEGDLNPDNSDVDKLFIQLVQTYNQLFEENPINASGVDAKAILSARLSKSRRLENLIAQLPGEKKNGLFGNLIALSLGLTPNFKSNFDLAEDAKLQLSKDTYDDDLDNLLAQIGDQYADLFLAAKNLSDAILLSDILRLNSEITKAPLSASMIKRYDEHHQDLTLLKALVRQQLPEKYKEIFFDQSKNGYAGYIDGGASQEEFYKFIKPILEKMDGTEELLAKLNREDLLRKQRTFDNGSIPHQIHLGELHAILRRQEDFYPFLKDNREKIEKILTFRIPYYVGPLARGNSRFAWMTRKSEETITPWNFEEVVDKGASAQSFIERMTNFDKNLPNEKVLPKHSLLYEYFTVYNELTKVKYVTEGMRKPAFLSGEQKKAIVDLLFKTNRKVTVKQLKEDYFKKIECFDSVEISGVEDRFNASLGTYHDLLKIIKDKDFLDNEENEDILEDIVLTLTLFEDREMIEERLKTYAHLFDDKVMKQLKRRRYTGWGRLSRKLINGIRDKQSGKTILDFLKSDGFANRNFMQLIHDDSLTFKEDIQKAQVSGQGDSLHEHIANLAGSPAIKKGILQTVKVVDELVKVMGRHKPENIVIEMARENQTTQKGQKNSRERMKRIEEGIKELGSQILKEHPVENTQLQNEKLYLYYLQNGRDMYVDQELDINRLSDYDVDHIVPQSFIKDDSIDNKVLTRSDKNRGKSDNVPSEEVVKKMKNYWRQLLNAKLITQRKFDNLTKAERGGLSELDKAGFIKRQLVETRQITKHVAQILDSRMNTKYDENDKLIREVKVITLKSKLVSDFRKDFQFYKVREINNYHHAHDAYLNAVVGTALIKKYPKLESEFVYGDYKVYDVRKMIAKSEQEIGKATAKYFFYSNIMNFFKTEITLANGEIRKRPLIETNGETGEIVWDKGRDFATVRKVLSMPQVNIVKKTEVQTGGFSKESILPKRNSDKLIARKKDWDPKKYGGFDSPTVAYSVLVVAKVEKGKSKKLKSVKELLGLTIMERSSFEKNPIDFLEAKGYKEVKKDLIIKLPKYSLFELENGRKRMLASAGELQKGNELALPSKYVNFLYLASHYEKLKGSPEDNEQKQLFVEQHKHYLDEIIEQISEFSKRVILADANLDKVLSAYNKHRDKPIREQAENIIHLFTLTNLGAPAAFKYFDTTIDRKRYTSTKEVLDATLIHQSITGLYETRIDLSQLGGD

SEQ ID NO: 43 - protein, 1368 aa, Streptococcus pyogenes
MDKKYSIGLDIGTNSVGWAVITDDYKVPSKKFKVLGNTDRHSIKKNLIGALLFDSGEIAEATRLKRTARRRYTRRKNRICYLQEIFSNEMAKVDDSFFHRLEESFLVEEDKKHERHPIFGNIVDEVAYHEKYPTIYHLRKKLVDSTDKADLRLIYLALAHMIKFRGHFLIEGDLNPDNSDVDKLFIQLVQTYNQLFEENPINASGVDAKAILSARLSKSRRLENLIAQLPGEKKNGLFGNLIALSLGLTPNFKSNFDLAEDAKLQLSKDTYDDDLDNLLAQIGDQYADLFLAAKNLSDAILLSDILRLNSEITKAPLSASMIKRYDEHHQDLTLLKALVRQQLPEKYKEIFFDQSKNGYAGYIDGGASQEEFYKFIKPILEKMDGTEELLAKLNREDLLRKQRTFDNGSIPHQIHLGELHAILRRQEDFYPFLKDNREKIEKILTFRIPYYVGPLARGNSRFAWMTRKSEETITPWNFEEVVDKGASAQSFIERMTNFDKNLPNEKVLPKHSLLYEYFTVYNELTKVKYVTEGMRKPAFLSGEQKKAIVDLLFKTNRKVTVKQLKEDYFKKIECFDSVEISGVEDRFNASLGTYHDLLKIIKDKDFLDNEENEDILEDIVLTLTLFEDREMIEERLKTYAHLFDDKVMKQLKRRRYTGWGRLSRKLINGIRDKQSGKTILDFLKSDGFANRNFMQLIHDDSLTFKEDIQKAQVSGQGDSLHEHIANLAGSPAIKKGILQTVKVVDELVKVMGRHKPENIVIEMARENQTTQKGQKNSRERMKRIEEGIKELGSQILKEHPVENTQLQNEKLYLYYLQNGRDMYVDQELDINRLSDYDVDHIVPQSFIKDDSIDNKVLTRSDKNRGKSDNVPSEEVVKKMKNYWRQLLNAKLITQRKFDNLTKAERGGLSELDKAGFIKRQLVETRQITKHVAQILDSRMNTKYDENDKLIREVKVITLKSKLVSDFRKDFQFYKVREINNYHHAHDAYLNAVVGTALIKKYPKLESEFVYGDYKVYDVRKMLAKSEQEIGKATAKYFFYSNIMNFFKTEITLANGEIRKRPLIETNGETGEIVWDKGRDFATVRKVLSMPQVNIVKKTEVQTGGFSKESILPKRNSDKLIARKKDWDPKKYGGFDSPTVAYSVLVVAKVEKGKSKKLKSVKELLGITIMERSSFEKNPIDFLEAKGYKEVRKDLIIKLPKYSLFELENGRKRMLASAGELQKGNELALPSKYVNFLYLASHYEKLKGSPEDNEQKQLFVEQHKHYLDEIIEQISEFSKRVILADANLDKVLSAYNKHRDKPIREQAENIIHLFTLTNLGAPTAFKYFDTTIDRKRYTSTKEVLDATFIHQSITGLYETRIDLSQLGGD

SEQ ID NO: 44 - protein, 1371 aa, Streptococcus pyogenes
MDKKYSIGLDIGTNSVGWAVITDDYKVPSKKFKVLGNTDRHSIKKNLIGALLFDSGETAEATRLKRTARRRYTRRKNRICYLQEIFSNEMAKVDDSFFHRLEESFLVEEDKKHERHPIFGNIVDEVAYHEKYPTIYHLRKKLADSTDKADLRLIYLALAHMIKFRGHFLIEGDLNPDNSDVDKLFIQLVQTYNQLFEENPINASRVDAKAILSARLSKSRRLENLIAQLPGEKKNGLFGNLIALSLGLTPNFKSNFDLAEDAKLQLSKDTYDDDLDNLLAQIGDQYADLFLAAKNLSDATLLSDILRVNSEITKAPLSASMIKRYDEHHQDLTLLKALVRQQLPEKYKEIFFDQSKNGYAGYIDGGASQEEFYKFIKPILEKMDGTEELLAKLNREDLLRKQRTFDNGSIPHQIHLGELHAILRRQEDFYPFLKDNREKIEKILTFRIPYYVGPLARGNSRFAWMTRKSEETITPWNFEEVVDKGASAQSFIERMTNFDKNLPNEKVLPKHSLLYEYFTVYNELTKVKYVTEGMRKPAFLSGEQKKAIVDLLFKTNRKVTVKQLKEDYFKKIECFDSVEISGVEDRFNASLGTYHDLLKIIKDKDFLDNEENEDILEDIVLTLTLFEDKEMIEERLKTYAHLFDDKVMKQLKRRHYTGWGRLSRKLINGIRDKQSGKTILDFLKSDGFANRNFIQLIHDDSLTFKEAIQKAQVSGQGHSLHEQIANLAGSPAIKKGILQSVKVVDELVKVMGHKPENIVIEMARENQTTQKGQKNSRERMKRIEEGIKELGSQILKEHPVENTQLQNEKLYLYYLQNGRDMYVDQELDINRLSDYDVDHIVPQSFIKDDSIDNKVLTRSDKNRGKSDDVPSEEVVKKMKNYWRQLLNAKLITQRKFDNLTKAERGGLSELDKAGFIKRQLVETRQITKHVAQILDSRMNTKYDENDKLIREVKVITLKSKLVSDFRKDFQFYKVREINNYHHAHDAYLNAVVGTALIKKYPKLESEFVYGDYKVYDVRKMIAKSEQEIGKATAKRFFYSNIMNFFKTEITLANGEIRKRPLIETNEETGEIVWDKGRDFATVRKVLSMPQVNIVKKTEVQTGALTNESIYARGSFDKLISRKHRFESSKYGGFGSPTVTYSVLVVAKSKVQDGKVKKIKTGKELIGITLLDKLVFEKNPLKFIEDKGYGNVQIDKCIKLPKYSLFEFENGTRRMLASVMANNNSRGDLQKANEMFLPAKLVTLLYHAHKIESSKELEHEAYILDHYNDLYQLLSYIERFASLYVDVEKNISKVKELFSNIESYSISEICSSVINLLTLTASGAPADFKFLGTTIPRKRYGSPQSILSSTLIHQSITGLYETRIDLSQLGSD

SEQ ID NO: 45 - protein, 1121 aa, Streptococcus thermophilus
MSDLVLGLDIGIGSVGVGILNKVTGEIIHKNSRIFPAAQAENNLVRRTNRQGRRLARRKKHRRVRLNRLFEESGLITDFTKISINLNPYQLRVKGLTDELSNEELFIALKNMVKHRGISYLDDASDDGNSSVGDYAQIVKENSKQLETKTPGQIQLERYQTYGQLRGDFTVEKDGKKHRLINVFPTSAYRSEALRILQTQQEFNPQITDEFINRYLEILTGKRKYYHGPGNEKSRTDYGRYRTSGETLDNIFGILIGKCTFYPDEFRAAKASYTAQEFNLLNDLNNLTVPTETKKLSKEQKNQIINYVKNEKAMGPAKLFKYIAKLLSCDVADIKGYRIDKSGKAEIHTFEAYRKMKTLETLDIEQMDRETLDKLAYVLTLNTEREGIQEALEHEFADGSFSQKQVDELVQFRKANSSIFGKGWHNFSVKLMMELIPELYETSEEQMTILTRLGKQKTTSSSNKTKYIDEKLLTEEIYNPVVAKSVRQAIKIVNAAIKEYGDFDNIVIEMARETNEDDEKKAIQKIQKANKDEKDAAMLKAANQYNGKAELPHSVFHGHKQLATKIRLWHQQGERCLYTGKTISIHDLINNSNQFEVDHILPLSITFDDSLANKVLVYATANQEKGQRTPYQALDSMDDAWSFRELKAFVRESKTLSNKKKEYLLTEEDISKFDVRKKFIERNLVDTRYASRVVLNALQEHFRAHKIDTKVSVVRGQFTSQLRRHWGIEKTRDTYHHHAVDALIIAASSQLNLWKKQKNTLVSYSEDQLLDIETGELISDDEYKESVFKAPYQHFVDTLKSKEFEDSILFSYQVDSKFNRKISDATIYATRQAKVGKDKADETYVLGKIKDIYTQDGYDAFMKIYKKDKSKFLMYRHDPQTFEKVIEPILENYPNKQINEKGKEVPCNPFLKYKEEHGYIRKYSKKGNGPEIKSLKYYDSKLGNHIDITPKDSNNKVVLQSVSPWRADVYFNKTTGKYEILGLKYADLQFEKGTGTYKISQEKYNDIKKKEGVDSDSEFKFTLYKNDLLLVKDTETKEQQLFRFLSRTMPKQKHYVELKPYDKQKFEGGEALIKVLGNVANSGQCKKGLGKSNISIYKVRTDVLGNQHIIKNEGDKPKLDF

SEQ ID NO: 46 - protein, 1388 aa, Streptococcus thermophilus
MTKPYSIGLDIGTNSVGWAVTTDNYKVPSKKMKVLGNTSKKYIKKNLLGVLLFDSGITAEGRRLKRTARRRYTRRRNRILYLQEIFSTEMATLDDAFFQRLDDSFLVPDDKRDSKYPIFGNLVEEKAYHDEFPTIYHLRKYLADSTKKADLRLVYLALAHMIKYRGHFLIEGEFNSKNNDIQKNFQDFLDTYNAIFESDLSLENSKQLEEIVKDKISKLEKKDRILKLFPGEKNSGIFSEFLKLIVGNQADFRKCFNLDEKASLHFSKESYDEDLETLLGYIGDDYSDVFLKAKKLYDAILLSGFLTVTDNETEAPLSSAMIKRYNEHKEDLALLKEYIRNISLKTYNEVFKDDTKNGYAGYIDGKTNQEDFYVYLKKLLAEFEGADYFLEKIDREDFLRKQRTFDNGSIPYQIHLQEMRAILDKQAKFYPFLAKNKERIEKILTFRIPYYVGPLARGNSDFAWSIRKRNEKITPWNFEDVIDKESSAEAFINRMTSFDLYLPEEKVLPKHSLLYETFNVYNELTKVRFIAESMRDYQFLDSKQKKDIVRLYFKDKRKVTDKDIIEYLHAIYGYDGIELKGIEKQFNSSLSTYHDLLNIINDKEFLDDSSNEAIIEEIIHTLTIFEDREMIKQRLSKFENIFDKSVLKKLSRRHYTGWGKLSAKLINGIRDEKSGNTILDYLIDDGISNRNFMQLIHDDALSFKKKIQKAQIIGDEDKGNIKEVVKSLPGSPAIKKGILQSIKIVDELVKVMGGRKPESIVVEMARENQYTNQGKSNSQQRLKRLEKSLKELGSKILKENIPAKLSKIDNNALQNDRLYLYYLQNGKDMYTGDDLDIDRLSNYDIDHIIPQAFLKDNSIDNKVLVSSASNRGKSDDVPSLEVVKKRKTFWYQLLKSKLISQRKFDNLTKAERGGLSPEDKAGFIQRQLVETRQITKHVARLLDEKFNNKKDENNRAVRTVKIITLKSTLVSQFRKDFELYKVREINDFHHAHDAYLNAVVASALLKKYPKLEPEFVYGDYPKYNSFRERKSATEKVYFYSNIMNIFKKSISLADGRVIERPLIEVNEETGESVWNKESDLATVRRVLSYPQVNVVKKVEEQNHGLDRGKPKGLFNANLSSKPKPNSNENLVGAKEYLDPKKYGGYAGISNSFTVLVKGTIEKGAKKKITNVLEFQGISILDRINYRKDKLNFLLEKGYKDIELIIELPKYSLFELSDGSRRMLASILSTNNKRGEIHKGNQIFLSQKFVKLLYHAKRISNTINENHRKYVENHKKEFEELFYYILEFNENYVGAKKNGKLLNSAFQSWQNHSIDELCSSFIGPTGSERKGLFELTSRGSAADFEFLGVKIPRYRDYTPSSLLKDATLIHQSVTGLYETRIDLAKLGEG

SEQ ID NO: 47 - protein, 1138 aa, Acidothermus cellulolyticus
MGGSEVGTVPVTWRLGVDVGERSIGLAAVSYEEDKPKEILAAVSWIHDGGVGDERSGASRLALRGMARRARRLRRFRRARLRDLDMLLSELGWTPLPDKNVSPVDAWLARKRLAEEYVVDETERRRLLGYAVSHMARHRGWRNPWTTIKDLKNLPQPSDSWERTRESLEARYSVSLEPGTVGQWAGYLLQRAPGIRLNPTQQSAGRRAELSNATAFETRLRQEDVLWELRCIADVQGLPEDVVSNVIDAVFCQKRPSVPAERIGRDPLDPSQLRASRACLEFQEYRIVAAVANLRIRDGSGSRPLSLEERNAVIEALLAQTERSLTWSDIALEILKLPNESDLTSVPEEDGPSSLAYSQFAPFDETSARIAEFIAKNRRKIPTFAQWWQEQDRTSRSDLVAALADNSIAGEEEQELLVHLPDAELEALEGLALPSGRVAYSRLTLSGLTRVMRDDGVDVHNARKTCFGVDDNWRPPLPALHEATGHPVVDRNLAILRKFLSSATMRWGPPQSIVVELARGASESRERQAEEEAARRAHRKANDRIRAELRASGLSDPSPADLVRARLLELYDCHCMYCGAPISWENSELDHIVPRTDGGSNRHENLAITCGACNKEKGRRPFASWAETSNRVQLRDVIDRVQKLKYSGNMYWTRDEFSRYKKSVVARLKRRTSDPEVIQSIESTGYAAVALRDRLLSYGEKNGVAQVAVFRGGVTAEARRWLDISIERLFSRVAIFAQSTSTKRLDRRHHAVDAVVLTTLTPGVAKTLADARSRRVSAEFWRRPSDVNRHSTEEPQSPAYRQWKESCSGLGDLLISTAARDSIAVAAPLRLRPTGALHEETLRAFSEHTVGAAWKGAELRRIVEPEVYAAFLALTDPGGRFLKVSPSEDVLPADENRHIVLSDRVLGPRDRVKLFPDDRGSIRVRGGAAYIASFHHARVFRWGSSHSPSFALLRVSLADLAVAGLLRDGVDVFTAELPPWTPAWRYASIALVKAVESGDAKQVGWLVPGDELDFGPEGVTTAAGDLSMFLKYFPERHWVVTGFEDDKRINLKPAFLSAEQAEVLRTERSDRPDTLTEAGEILAQFFPRCWRATVAKVLCHPGLTVIRRTALGQPRWRRGHLPYSWRPWSADPWSGGTP

SEQ ID NO: 48 - protein, 1629 aa, Francisella novicida
MNFKILPIAIDLGVKNTGVFSAFYQKGTSLERLDNKNGKVYELSKDSYTLLMNNRTARRHQRRGIDRKQLVKRLFKLIWTEQLNLEWDKDTQQAISFLFNRRGFSFITDGYSPEYLNIVPEQVKAILMDIFDDYNGEDDLDSYLKLATEQESKISEIYNKLMQKILEFKLMKLCTDIKDDKVSTKTLKEITSYEFELLADYLANYSESLKTQKFSYTDKQGNLKELSYYHHDKYNIQEFLKRHATINDRILDTLLTDDLDIWNFNFEKFDFDKNEEKLQNQEDKDHIQAHLHHFVFAVNKIKSEMASGGRHRSQYFQEITNVLDENNHQEGYLKNFCENLHNKKYSNLSVKNLVNLIGNLSNLELKPLRKYFNDKIHAKADHWDEQKFTETYCHWILGEWRVGVKDQDKKDGAKYSYKDLCNELKQKVTKAGLVDFLLELDPCRTIPPYLDNNNRKPPKCQSLILNPKFLDNQYPNWQQYLQELKKLQSIQNYLDSFETDLKVLKSSKDQPYFVEYKSSNQQIASGQRDYKDLDARILQFIFDRVKASDELLLNEIYFQAKKLKQKASSELEKLESSKKLDEVIANSQLSQILKSQHTNGIFEQGTFLHLVCKYYKQRQRARDSRLYIMPEYRYDKKLHKYNNTGRFDDDNQLLTYCNHKPRQKRYQLLNDLAGVLQVSPNFLKDKIGSDDDLFISKWLVEHIRGFKKACEDSLKIQKDNRGLLNHKINIARNTKGKCEKEIFNLICKIEGSEDKKGNYKHGLAYELGVLLFGEPNEASKPEFDRKIKKFNSIYSFAQIQQIAFAERKGNANTCAVCSADNAHRMQQIKITEPVEDNKDKIILSAKAQRLPAIPTRIVDGAVKKMATILAKNIVDDNWQNIKQVLSAKHQLHIPIITESNAFEFEPALADVKGKSLKDRRKKALERISPENIFKDKNNRIKEFAKGISAYSGANLTDGDFDGAKEELDHIIPRSHKKYGTLNDEANLICVTRGDNKNKGNRIFCLRDLADNYKLKQFETTDDLEIEKKIADTIWDANKKDFKFGNYRSFINLTPQEQKAFRHALFLADENPIKQAVIRAINNRNRTFVNGTQRYFAEVLANNIYLRAKKENLNTDKISFDYFGIPTIGNGRGIAEIRQLYEKVDSDIQAYAKGDKPQASYSHLIDAMLAFCIAADEHRNDGSIGLEIDKNYSLYPLDKNTGEVFTKDIFSQIKITDNEFSDKKLVRKKAIEGFNTHRQMTRDGIYAENYLPILIHKELNEVRKGYTWKNSEEIKIFKGKKYDIQQLNNLVYCLKFVDKPISIDIQISTLEELRNILTTNNIAATAEYYYINLKTQKLHEYYIENYNTALGYKKYSKEMEFLRSLAYRSERVKIKSIDDVKQVLDKDSNFIIGKITLPFKKEWQRLYREWQNTTIKDDYEFLKSFFNVKSITKLHKKVRKDFSLPISTNEGKFLVKRKTWDNNFIYQILNDSDSRADGTKPFIPAFDISKNEIVEAIIDSFTSKNIFWLPKNIELQKVDNKNIFAIDTSKWFEVETPSDLRDIGIATIQYKIDNNSRPKVRVKLDYVIDDDSKINYFMNHSLLKSRYPDKVLEILKQSTIIEFESSGFNKTIKEMLGMKLAGIYNETSNN

SEQ ID NO: 49 - protein, 1068 aa, Verminephrobacter eiseniae
MNKAVAYRLALDLGSTSLGWAIFRLNEAREPTAIIRAGVRIFSDGRNANSEPLAVHRRVARAMRRRRDRLLKRKKRMHDQLVQHGFFPAEVAERKELERLNPYQLRAKGLHEALTPGEFARALFHINQRRGFKSNRKTDRKDNDSGALKQAISELRKRIQDSDCATAGEWFWKERMQQKPEGVRGQWVRARYRKTPSTTDEGKKRIGYDLYVDRAMVEQEFDALWAAQAALQPGLFTEAARAELKDTLLYQRDLRPVKPGRCTLLPAEERAPLALPSTQRFRILQEVNNLRLLDEALREVPLNLAQRDAVVSALEGKKELSFAAIRKLLTLSGKFNLEDEKRAELKGNATSVILARKDLFGDAWAGFDAAVQDEIVWRLVSQESEGALIAWLQQHTGVDGVCAEAIVNTRLPDGYGRLSRKALERIVPALQREVCTYDKAVQAAGFAHHSDLGFDFDYAEDEVQQVGEHTIASTGEVQAQYAFKQLPYYGKALQRHVAFGSGDAKDHEEKCYGKIANPTVHIGLNQVRTVVNALIRRYGHPTEVVVELARDLKQSREQKQQTQREQADNQKRNEDIRKRIAPILETSPERVRDRDIKKWILWEELNKKDIADRHCPYSGERISATMLLSEAVEIEHILPFSRTLDDSLNNRTVAMRRANRIKGDRTPWEARADFEAQGWRYEAILQRAEGMPPRKRYRFAEDGYQRWLGKDRNFLARALNDTSYLSRLAANYLRLVCPQGVRVIPGQMTDKLRGKFGLNSVLGLDGKKNRNDHRHHAVDACVIGVTDQGLMQRFANASKQARENGLTRLVQDMLLPWWPSYYDHVERAVRHIRVSHRPDHGFEGAMMKGTAHGIREDGIREDGRIKQRPKAKGSADHKTITLIPIDEPRQLARHGVDAEGKPLPYKGYASGSNYCIEITKNGKGKWEGQVISTFDAYRIKAAADAAARAGQVISTVEADSIVRKSGWERLRGAQSQNGQPLVMRLVIGDSVRMEVDGRDEVMRVVKMSGKEMVFAPVREANVDKRNNMPDEQDPFTYTYKRADQLRKAKARQVTISPIGELRDPGFKG

SEQ ID NO: 50 - protein, 1125 aa, Francisella tularensis
MNVKILPIAIDLDVKNTGVFSAFYQKGTSLEKLDNKNGKVYELSKDSYTLLMNNRTARRHQRRGIDRKQLVKRLFKLVWTEQLNLEWDKDTQQAISFLFNRRGFSFITDGYSTEYLNIVPEQVKAILMDIFDDYNGEDDLDSYLKLATEQESKISEIYNKLMQKILEFKLRKLCTDIKDDKVSTKTLKEITSYEFELLADYLANYSESLKIQKFSYTDKQGNLKELSYYHHDKYNIQEFLKRHATINDEILDTLLTDDFDIWNFNFEKFDFDKNEEKLQNQEDKDHTQAHLHHFVFAVNKIKSEMASGGRHRSQYFQEITNVLDENNHQEGYLKNFCENLHNKKYSNLSVKNLVNLVGNLSNLELKPLRKYFNDKIHAKADHWDEQKFTETYCHWILGEWRVGVKDQDKKDGAKYSYKDLCNELKQKVTKAGLIDFLLELDPCRTIPPYLDNNNRKPPKCQSLILNPKFLDNQYPNWQQYLQELKKLQSIQDYLDSFETDLKDLKSSKDQPYFVEYKSSNQQMASGQRDYKDLDARILQFIFDRVKASDELLLNEIYFQAKKLKQKASSELEKLESSKKLDEVIANSQLSQILKSQHTNGIFEQGTFLHLVCKYYKQRQRARDSRLYIMPEYRYDKKLDKYNNTGRFDDNNQLLTYCNHKPRQKRYQLLNDLAGVLQVSRNQLLSSVEEWFQQAQRVGEISKSQDEQIFEWLKSFKIASYCKAAVEMQKQYRGTLKNAIQTAIFRQSENINKNKNKNTGNQQQALSENSKDVKSLTADEKKLLKLIENIAKASQKIGESLGLNDKQIKKFNSIYSFAQIQQIAFAERKGNANTCAVCSADNAHRMQQIKITELVEDNKDNIILSAKAQRLPAIPTRIVDGAVKKMATILAKNIVDDNWQNIKQVLSAKHQLHIPIITESNAFEFEPALADVKGKSLKDRRKKALERISPENIFKDKNNRIKEFAKGISAYSGANLTDGDFDGAKEELDHIIPRSHKKYGTLNDEANLICVTRDDNKNIFAIDTSKWFEIETPSDLRDIGVATIQYKIDNNSRPKVRVKLDYVIDDDSKINYFMNHSLLKSRYPDKVLEILKQSTIIEFESSGFNKTIKEMLGMTLAGIYNETSNN

SEQ ID NO: 51 - protein, 1064 aa, Bradyrhizobium sp.
MKRTSLRAYRLGVDLGANSLGWFVVWLDDHGQPEGLGPGGVRIFPDGRNPQSKQSNAAGRRLARSARRRRDRYLQRRGKLMGLLVKHGLMPADEPARKRLECLDPYGLRAKALDEVLPLHHVGRALFHLNQRRGLFANRAIEQGDKDASAIKAAAGRLQTSMQACGARTLGEFLNRRHQLRATVRARSPVGGDVQARYEFYPTRAMVDAEFEAIWAAQAPHHPTMTAEAHDTIREAIFSQRAMKRPSIGKCSLDPATSQDDVDGFRCAWSHPLAQRFRIWQDVRNLAVVETGPTSSRLGKEDQDKVARALLQTDQLSFDEIRGLLGLPSDARFNLESDRRDHLKGDATGAILSARRHFGPAWHDRSLDRQIDIVALLESALDEAAIIASLGTTHSLDEAAAQRALSALLPDGYCRLGLRAIKRVLPLMEAGRTYAEAASAAGYDHALLPGGKLSPTGYLPYYGQWLQNDVVGSDDERDTNERRWGRLPNPTVHIGIGQLRRVVNELIRWHGPPAEITVELTRDLKLSPRRLAELEREQAENQRKNDKRTSLLRKLGLPASTHNLLKLRLWDEQGDVASECPYTGEAIGLERLVSDDVDIDHLIPFSISWDDSAANKVVCMRYANREKGNRTPFEAFGHRQGRPYDWADIAERAARLPRGKRWRFGPGARAQFEELGDFQARLLNETSWLARVAKQYLAAVTHPHRIHVLPGRLTALLRATWELNDLLPGSDDRAAKSRKDHRHHAIDALVAALTDQALLRRMANAHDDTRRKIEVLLPWPTFRIDLETRLKAMLVSHKPDHGLQARLHEDTAYGTVEHPETEDGANLVYRKTFVDISEKEIDRIRDRRLRDLVRAHVAGERQQGKTLKAAVLSFAQRRDIAGHPNGIRHVRLTKSIKPDYLVPIRDKAGRIYKSYNAGENAFVDILQAESGRWIARATTVFQANQANESHDAPAAQPIMRVFKGDMLRIDHAGAEKFVKIVRLSPSNNLLYLVEHHQAGVFQTRHDDPEDSFRWLFASFDKLREWNAELVRIDTLGQPWRRKRGLETGSEDATRIGWTRPKKWP

SEQ ID NO: 52 - protein, 1354 aa, Flavobacterium psychrophilum
MKKILGLDLGTNSIGWAFINEAENEIEVSSIVNTGVRIVPLTTDEESDFKKGNTISINADRTLKRGARRGLQRFKQRREALLETFNRIKFIATDFVYAETGAATTFSSYQLRAKSAVEAVTKEELVKVLLMLNKKRGYKSSRKAKTAEEGDAIDGMKIAKEIFENNLTPGQWVYNSLSKGGKFIPDFYHSDLQKELEKIVRFQNQFHSEQINDKLLADIQGKSRTQTSQHFSKTLNIPLAENKGTREETKLQHYQWRNEALANELDMKILAFIITEINNQINQSSGYLGAISDRSKELYFNQETVGQYQYKQLQENVHAKLKNQVFYRQDYLDEFEKIWETQAKFHSELNEKLKAEIRDITIFYQRKLKSQKHLVSFCEFEKGHKAIPKSSPLFQEFRIWQNLNNVVVKNETTKEVFELSEELKQLIAEELQFKESMTDVQMLTFCELKKGTHTVNFKKIEGNRTNTSIYKAFEKILEVEGYEIDFSKMKPLEIKETVAPIFETLNINTVILDFDPTIQGNDFDKQPYYQLWHLLYSAEDDDKLKETLKTKFGFKENHLPFILNINLQADYGSLSAKAIKKILPHLMDGHIYDKACLMVGYNHSSSLTTAQNNDRVLKDTLELLKKNSLRNPVVEKILNQMINVINAIMKDPAMGKPDEIRVELARELKANNEQRKKATSDINTATTEHERIRKLLHSEFNIPRVTRNDIIRYKLWLETGGISLYTGNPIKASDLFSKNYDIEHIIPKSRLFDDSFSNKTLCERQLNIDKSNKTAYSFLQEKLSENDFAAYENRVKDLFKTGKIKSYTKYKKLLMADNEIPEGFIDRQLRETQYIAKKAKEILLEVSRNVTATIGSVTDKLRQDWELVDVMKELNWEKYDKLGLTHIEEGKNGERLSKIKDWTKRNDHRHHAMDAITVAFTKPAYIQYLNNLNAKTQGENKANSIIGIENKHLYRDKNNKLRFISPMKNFREEAKKQLESILISYKAKNKVVTKNKNTTKKSGGTNQKIQLTPRGRLHKETVYGKLQQYATKEEKVNASFTEDYIQKVAKKEYREALLKRLEENDNDPKKAFTGKNALNKTPIYISLKDNIIVPEKVKTVWLETDYTIRKDITPDLKIDKVIDVGIKRILQNRLNEFNGDPKKAFVNLGESPIWLNKEKGIAIKRVTISGVSNAQALHTKKDHLGNEILDKNGNPIPVDFISTGNNHHVAIYRDEKGNLQEEVVSFYDAVIRRNLGLSVINKNHEKGWEFLFSMKQNEFFIFPSDGFNPHEIDLLNPNNYHLISPNIFRVQKISTKNYMFNHHLETKAVDGEMLKSKKELSKTSYHFIQTPTNLNGIIKVRINHLGKIVHLGEY

SEQ ID NO: 53 - protein, 1062 aa, Actinobacillus succinogenes
MNLNYILGLDLGIASVGWAVVEIDEQENPQRLIDVGVRTFDRAEVLKTGESLALARRLARSSRRLVKRRAERIKKAKRLLKAENLLLSADEILPNEAWQLRVKGLDQKLERQEWAAVLLHLLKHRGYLSQRKNESKSENKELGALLSGVAINHQILQSAEYRTPAEIAVNKFQAEEGHIRNQRGAYTHTFSRLDLLAEMELLFQRQATLGNPHTSTKLLENLTALLMWQKPALAGEAILKMLGKCTFEPTEYKAAKNSYSAERFVWLTKLNNLRILEQGAERALTDNERFALLDQPYEKAKLTYAQVRTLLGLSDEAIFKGLRYQGEDKKAVETKTTLMEVKAYHQIRKALEGLDLKAEWNELKNNPALLDEIGTAFSLYKTDDDIHRYLDGKLSESVLNALLENLNFDKFIQLSLKALQQILPLMLQGQRYDEAVSAIYGDHYGKKSDEIDRLLPNIPTDEIRNPVVLRTLTQARKVINAVVRLYGSPARIHIETGREVGKSYQDRKKLEKQQEENRKQRENAVKKFKEYFPNFVGEPKGKDILKMRLYELQQAKCLYSGKSLELYRLLEKGYVEVDHALPFSRTWDDSFNNKVLVLANENQNKGNATPYEWLDGKNNSEGWQHFVARVQTSGFSYAKKQRVLIQELDEKSFIERNLNDTRYVARFLCNHIADNMLLTGKGKRKVFASNGQITALLRGCWGLQKVRENNDRHHALDAVVVACSTKSMQDKITKFVKYKEGRLFKDKKDGVYKGERINRETGEIISLHFPTPWKFFKENVEIRIFSENPKLELENRLPDYPQYNHEFVQPLFVSRMPTRKMTGQGHMETVKSAKRLDKGLSVLKVPLTQLKLSDLERMVNREREMALYEALKECLEQFGNDPAKAFAEPFYKKGGALVKAVRVEQTQKSGVLVRNGNGVADNATGSIVRVDVFTKGGKYFLVPIYTWQVAKGILPNKAVIQGKDESEWEEMDENAVFQFSMHKNDLIKVKTKKGEIFGYFNGLDRATGSIEIEEHDLEKSKGKNGSHRGLGVKTAFFLEKYQVDELGKNIRPCRPTKRQHVR

SEQ ID NO: 54 - protein, 1340 aa, Dorea longicatena
MEQEYYLGLDMGTGSVGWAVTDSEYHVLRKHGKALWGVRLFESASTAEERRMFRTSRRRLDRRNWRIEILQEIFAEEISKKDPGFFLRMKESKYYPEDKRDINGNCPELPYALFVDDDFTDKDYHKKFPTIYHLRKMLMNTEETPDIRLVYLAIHHMMKHRGHFLLSGDINEIKEFGTTFSKLLENIKNEELDWNLELGKEEYAVVESILKDNMLNRSTKKTRLIKALKAKSICEKAVLNLLAGGTVKLSDIFGLEELNETERPKISFADNGYDDYIGEVENELGEQFYIIETAKAVYDWAVLVEILGKYTSISEAKVATYEKHKSDLQFLKKIVRKYLTKEEYKDIFVSTSDKLKNYSAYIGMTKINGKKVDLQSKRCSKEEFYDFIKKNVLKKLEGQPEYEYLKEELERETFLPKQVNRDNGVIPYQIHLYELKKILGNLRDKIDLIKENEDKLVQLFEFRIPYYVGPLNKIDDGKEGKFTWAVRKSNEKIYPWNFENVVDIEASAEKFIRRMTNKCTYLMGEDVLPKDSLLYSKYMVLNELNNVKLDGEKLSVELKQRLYTDVFCKYRKVTVKKIKNYLKCEGIISGNVEITGIDGDFKASLTAYHDFKEILTGTELAKKDKENIITNIVLFGDDKKLLKKRLNRLYPQITPNQLKKICALSYTGWGRFSKKFLEEITAPDPETGEVWNIITALWESNNNLMQLLSNEYRFMEEVETYNMGKQTKTLSYETVENMYVSPSVKRQIWQTLKIVKELEKVMKESPKRVFIEMAREKQESKRTESRKKQLIDLYKACKNEEKDWVKELGDQEEQKLRSDKLYLYYTQKGRCMYSGEVIELKDLWDNTKYDIDHIYPQSKTMDDSLNNRVLVKKKYNATKSDKYPLNENIRHERKGFWKSLLDGGFISKEKYERLIRNTELSPEELAGFIERQIVETRQSTKAVAEILKQVFPESEIVYVKAGTVSRFRKDFELLKVREVNDLHHAKDAYLNIVVGNSYYVKFTKNASWFIKENPGRTYNLKKMFTSGWNIERNGEVAWEVGKKGTIVTVKQIMNKNNILVTRQVHEAKGGLFDQQIMKKGKGQIAIKETDERLASIEKYGGYNKAAGAYFMLVESKDKKGKTIRTIEFIPLYLKNKIESDESIALNFLEKGRGLKEPKILLKKIKIDTLFDVDGFKMWLSGRTGDRLLFKCANQLILDEKIIVTMKKIVKFIQRRQENRELKLSDKDGIDNEVLMEIYNTFVDKLENTVYRIRLSEQAKTLIDKQKEFERLSLEDKSSTLFEILHIFQCQSSAANLKMIGGPGKAGILVMNNNISKCNKISIINQSPTGIFENEIDLLKI

SEQ ID NO: 55 - protein, 984 aa, Campylobacter jejuni
MAKILAFDIGISSIGWAFSENDELKDCGVRIFTKAENPKTGESLALPRRIARSARKRLARRKARLNHLKHLIANEFKLNYEDYQSFDEILAKAYKGSLISPYELRFRALNELLSKQDFARVILHIAKRRGYDDIKNNGDEEKGKILKAIKQNEEKLANYQSVGEYLYKEYFQKFKENSKEFINVRNKKESYERCIAQSFLKDELKLIFKKQREFGFSFSKKFEEEVLSVAFYKRALKDFSHLVGNCSFFTDEKRAPKNSPLAFMFVALTRIINLLNNLKNTLYTKDDLNALLNEVLKNGTLTYKQTKKLLGLSDDYEFKGEKGNYFIEFKKYKEFIKALGEHSLSQDDLNEIAKDITLIKDEIKLKKALAKYDLNENQIDNLSKLEFKDHLNISFKALKLITPLMLEGKKYDEACNELTLKVAINEDKKDFLPAFNETYYKDEVTNPVVLRAIKEYRKVLNALLKKYGKVHKINIELAREVGKNHSQRAKIEKEQNENYKAKKDAELECEKLGLKINSKNILKLRLFKEQKEFCVYSGEKIKLSDLQDEKMLEIDHIYPYSRSFDDSYMNKVLVFTKQNQEKLNQTPFEAFGNDSAKWQKIEVLAKNLPTKKQKRILDKNYKDKEQKDFKDRNLNDTRYIARLVLNYTKDYLDFLPLSDDENTKLNDTQKGSKVHVEAKSGMLTSALRHTWGFSTKDRNNHLHHAIDAVIIAYANNSIVKAFSDFKKEQESNTAELYAKKISELDYKNKRKFFEPFSGFRQKVLDKIDEIFVSKPERKKPSGALHEETFRKEEEFYQSYGGKEGVLKALELGKIRKVNGKIVKNGDMFRVDIFKHKKTNKFYAVPIYTMDFALKVLPNKAVARSKKGEIKDWILMDENYEFCFSLYKDSLILIQTKDMQEPEFVYYNAFTSSTVSLIVSKHDNKFETLSKNQKILFKNANEKEVIAKSIGIQNLKVFEKYIVSALGEVTKAEFRQREEFKNELR

SEQ ID NO: 56 - protein, 1037 aa, Parvibaculum lavamentivorans
MERIFGFDIGTTSIGFSVIDYSSTQSAGNIQRLGVRIFPEARDPDGTPLNQQRRQKRMMRRQLRRRRIRRKALNETLHEAGFLPAYGSADWPVVMADEPYELRRRGLEEGLSAYEFGRAIYHLAQHRHFKGRELEESDTPDPDVDDEKEAANERAATLKALKNEQTTLGAWLARRPPSDRKRGIHAHRNVVAEEFERLWEVQSKFHPALKSEEMRARISDTIFAQRPVFWRKNTLGECRFMPGEPLCPKGSWLSQQRRMLEKLNNLAIAGGNARPLDAEERDAILSKLQQQASMSWPGVRSALKALYKQRGEPGAEKSLKFNLELGGESKLLGNALEAKLADMFGPDWPAHPRKQEIRHAVHERLWAADYGETPDKKRVIILSEKDRKAHREAAANSFVADFGITGEQAAQLQALKLPTGWEPYSIPALNLFLAELEKGERFGALVNGPDWEGWRRTNFPHRNQPTGEILDKLPSPASKEERERISQLRNPTVVRTQNELRKVVNNLIGLYGKPDRIRIEVGRDVGKSKREREEIQSGIRRNEKQRKKATEDLIKNGIANPSRDDVEKWILWKEGQERCPYTGDQIGFNALFREGRYEVEHIWPRSRSFDNSPRNKTLCRKDVNIEKGNRMPFEAFGHDEDRWSAIQIRLQGMVSAKGGTGMSPGKVKRFLAKTMPEDFAARQLNDTRYAAKQILAQLKRLWPDMGPEAPVKVEAVTGQVTAQLRKLWTLNNILADDGEKTRADHRHHAIDALTVACTHPGMTNKLSRYWQLRDDPRAEKPALTPPWDTIRADAEKAVSEIVVSHRVRKKVSGPLHKETTYGDTGTDIKTKSGTYRQFVTRKKIESLSKGELDEIRDPRIKEIVAAHVAGRGGDPKKAFPPYPCVSPGGPEIRKVRLTSKQQLNLMAQTGNGYADLGSNHHIAIYRLPDGKADFEIVSLFDASRRLAQRNPIVQRTRADGASFVMSLAAGEAIMIPEGSKKGIWIVQGVWASGQVVLERDTDADHSTTTRPMPNPILKDDAKKVSIDPIGRVRPSND

SEQ ID NO: 57 - protein, 1107 aa, Eubacterium ventriosum
MGYTVGLDIGVASVGVAVLDENDNIVEAVSNIFDEADTSNNKVRRTLREGRRTKRRQKTRIEDFKQLWETSGYIIPHKLHLNIIELRNKGLTELLSLDELYCVLLSMLKHRGISYLEDADDGEKGNAYKKGLAFNEKQLKEKMPCEIQLERMKKYGKYHGEFIIEINDEKEYQSNVFTTKAYKKELEKIFETQRCNGNKINTKFIKKYMEIYERKREYYIGPGNEKSRTDYGIYTTRTDEEGNFIDEKNIFGKLIGKCSVYPEEYRASSASYTAQEFNLLNDLNNLKINNEKLTEFQKKEIVEIIKDASSVNMRKIIKKVIDEDIEQYSGARIDKKGKEIYHTFEIYRKLKKELKTINVDIDSFTREELDKTMDILTLNTERESIVKAFDEQKFVYEENLIKKLIEFRKNNQRLFSGWHSFSYKAMLQLIPVMYKEPKEQMQLLTEMNVFKSKKEKYVNYKYIPENEVVKEIYNPVVVKSIRTTVKILNALIKKYGYPESVVIEMPRDKNSDDEKEKIDMNQKKNQEEYEKILNKIYDEKGIEITNKDYKKQKKLVLKLKLWNEQEGLCLYSGKKIAIEDLLNHPEFFEIDHIIPKSISLDDSRSNKVLVYKTENSIKENDTPYHYLTRINGKWGFDEYKANVLELRRRGKIDDKKVNNLLCMEDITKIDVVKGFINRNLNDTRYASRVVLNEMQSFFESRKYCNTKVKVIRGSLTYQMRQDLHLKKNREESYSHHAVDAMLIAFSQKGYEAYRKIQKDCYDFETGEILDKEKWNKYIDDDEFDDILYKERMNEIRKKIIEAEEKVKYNYKIDKKCNRGLCNQTIYGTREKDGKIHKISSYNIYDDKECNSLKKMINSGKGSDLLMYNNDPKTYRDMLKILETYSSEKNPFVAYNKETGDYFRKYSKNHNGPKVEKVKYYSGQINSCIDISHKYGHAKNSKKVVLVSLNPYRTDVYYDNDTGKYYLVGVKYNHIKCVGNKYVIDSETYNELLRKEGVLNSDENLEDLNSKNITYKFSLYKNDIIQYEKGGEYYTERFLSRIKEQKNLIETKPINKPNFQRKNKKGEWENTRNQIALAKTKYVGKLVTDVLGNCYIVNMEKFSLVVDK

SEQ ID NO: 58 - protein, 1136 aa, Streptococcus gordonii
MNGLVLGLDIGIASVGVGILEKDTGKIIHASSRLFPAATADNNVERRSNRQGRRLNRRKKHRSVRLQDLFEGYGLLTDFSKVSMNLNPYQLRVQGMENQLTNEELFVALKNIVKRRGISYLDDASEDGGTVSSDYGKAVEENRKLLAEKTPGQIQLERFEKYGQLRGDFTVEENGEKHRLINVFSTSAYRKEAERILRKQQEFNSKITDEFIEDYLIILTGKRKYYHGPGNEKSRTDYGRFRTDGTTLDNIFGILIGKCTFYTEEYRASKASYTAQEFNLLNDLNNLTVPTETKKLSEEQKKLIIEYAKSAKTLGASTLLKYIAKMIDASVDQIRGYRVDVNNKPEMHTFEVYRKMQSLETIKVEELPRKVLDELAHILTLNTEREGIEEAINSKLKDIFNRDQVLELVQFRKNNSSLFSKGWHNFSIKLMMELIPELYETSEEQMTILTRLGKQRSKETSKRTKYIDEKELTEEIYNPVVAKSVRQAIKIINEATKKYGIFDNIVIEMARENNEEDAKKDYIKRQKANQDEKNAAMEKAAFQYNGKKELPDNIFHGHKELTTKIRLWHQQGEKCLYTGKNIPISDLIHNQYKYEIDHILPLSLSFDDSLSNKVLVLATANQEKGQRTPFQALDSMDDAWSYREFKSYVKDSKLLSNKKKDYLLTEEDISKIEVKQKFIERNLVDTRYSSRVVLNALQDFYKSHQLDTTISVVRGQFTSQLRRKWGIEKSRETYHHHAVDALIIAASSQLRLWKKHSNPLIAYKEGQFVDSETGEIVSLSDEEYKELVFKAPYDHFVDTLRSKKFEDSILFSYQVDSKYNRKISDATIYATRKAKLDKEKKEYTYTLGKIKDIYALGTKTPSKTGFYKFLDLYKTDKSQFLMYQKDRKTWDEVIEKIIEQYRPFKEYDKNGKEVDFNPFEKYRIGNGPIRKYSKKGNGPEIKSLKYYDILLGKHKNITPDGSRNTVALLSLNPWRTDVYYNSETKKYEFLGLKYADLCFEEGGAYGISEVKYKKIREKEGIGKNSEFKFTLYKNDLILIKDTETNCQQFFRFWSRTGKDNPKSFEKHKIELKPYEKAKFEKGEELKVLGKVPPSSNQFQKNMQIENLSIYKVKTDILGNKHFIKKEGDEPKLKFKK

SEQ ID NO: 59 - protein, 984 aa, Campylobacter jejuni
MARILAFDIGISSIGWAFSENDELKDCGVRIFTKAENPKTGESLALPRRLARSARKRLARRKARLNHLKHLIANEFKLNYEDYQSFDESLAKAYKGSLISPYELRFRALNELLSKQDFARVILHIAKRRGYDDIKNNGDEEKSEILKAIKQNEEKLVNYQSVGEYLYKEYFQKFKENSKEFINVRNKKESYERCITQSFLKDELKLIFQKQREFGFSFSKKFEEEVLSVAFYKRALKDFSHLVGNCSFFTDEKRAPKNSPLAFMFVALTRIINILNNLKNTEGILYTKDDLNALLNEVLKNGTLTYKQTKKLLGLSDDYEFKGEKGTYFIEFKKYKEFIKALGEHNLSQDDLNEIAKDITLIKDEIKLKKALAKYDLNQNQIDSLSKLEFKDHLNISFKALKLITPLMLEGKKYDEACNELNLKVAINEDKKDFLPAFNETYYKDEVTNPVVLRAIKEYRKILNALLKKYGKVHKINIELAREVGKNHSQRAKIEKEQNENYKAKKDAEIECEKLGLKINSKNILKLRLFKEQKEFCAYSGEKIKLSDLQDEKMLEIDHIYPYSRSFDDSYMNKVLVFTKQNQEKLNKTPFEAFGNDSTKWQKIEVLAKNLPEKKQKRILDKNYKDKEQKDFKDRNLNDTRYIARLVLNYTKDYLDFLPLSDDENTKLNDTQKGSKVHVEAKSGMLTSALRHTWGFSAKDRNNHLHHAIDAAIIAYANNSIVKAFSDFKKEQESNSVELYAKKISELDYKNKRKFFEPFSGFRQKVLDKIDEIFVSKPERKKPSGALHEETFRKEEEFYQSYGGKEGVLKALELGKIRKVNGKIVKNGDMFRVDIFKHKKTNKFYAVPIYTMDFALKVLPNKAVARSKKGEIKDWILMDENYEFCFSLYKDSLILIQTKDMQEPELVYFNAFTSSTVSLIVSKHDNKFETLSKNQKILFKNANEKEVIAKSIGIQNLKVFEKYIVSALGEVTKAEFRQREDFKK

SEQ ID NO: 60 - protein, 1079 aa, Dinoroseobacter shibae
MRLGLDIGTSSIGWWLYETDGAGSDARITGVVDGGVRIFSDGRDPKSGASLAVDRRAARAMRRRRDRYLRRRATLMKVLAETGLMPADPAEAKALEALDPFALRAAGLDEPLPLPHLGRALFHLNQRRGFKSNRKTDRGDNESGKIKDATARLDMEMMANGARTYGEFLHKRRQKATDPRHVPSVRTRLSIANRGGPDGKEEAGYDFYPDRRHLEEEFHKLWAAQGAHHPELTETLRDLLFEKIFFQRPLKEPEVGLCLFSGHHGVPPKDPRLPKAHPLTQRRVLYETVNQLRVTADGREARPLTREERDQVIHALDNKKPTKSLSSMVLKLPALAKVLKLRDGERFTLETGVRDAIACDPLRASPAHPDRFGPRWSILDADAQWEVISRIRRVQSDAEHAALVDWLTEAHGLDRAHAEATAHAPLPDGYGRLGLTATTRILYQLTADVVTYADAVKACGWHHSDGRTGECFDRLPYYGEVLERHVIPGSYHPDDDDITRFGRITNPTVHIGLNQLRRLVNRIIETHGKPHQIVVELARDLKKSEEQKRADIKRIRDTTEAAKKRSEKLEELEIEDNGRNRMLLRLWEDLNPDDAMRRFCPYTGTRISAAMIFDGSCDVDHILPYSRTLDDSFPNRTLCLREANRQKRNQTPWQAWGDTPHWHAIAANLKNLPENKRWRFAPDAMTRFEGENGFLDRALKDTQYLARISRSYLDTLFTKGGHVWVVPGRFTEMLRRHWGLNSLLSDAGRGAVKAKNRTDHRHHAIDAAVIAATDPGLLNRISRAAGQGEAAGQSAELIARDTPPPWEGFRDDLRVRLDRIIVSHRADHGRIDHAARKQGRDSTAGQLHQETAYSIVDDIHVASRTDLLSLKPAQLLDEPGRSGQVRDPQLRKALRVATGGKTGKDFENALRYFASKPGPYQAIRRVRIIKPLQAQARVPVPAQDPIKAYQGGSNHLFEIWRLPDGEIEAQVITSFEAHTLEGEKRPHPAAKRLLRVHKGDMVALERDGRRVVGHVQKMDIANGLFIVPHNEANADTRNNDKSDPFKWIQIGARPAIASGIRRVSVDEIGRLRDGGTRPI

SEQ ID NO: 61 - protein, 1096 aa, Eubacterium dolichum
MMEVFMGRLVLGLDIGITSVGFGIIDLDESEIVDYGVRLFKEGTAAENETRRTKRGGRRLKRRRVTRREDMLHLLKQAGIISTSFHPLNNPYDVRVKGLNERLNGEELATALLHLCKHRGSSVETIEDDEAKAKEAGETKKVLSMNDQLLKSGKYVCEIQKERLRTNGHIRGHENNFKTRAYVDEAFQILSHQDLSNELKSAIITIISRKRMYYDGPGGPLSPTPYGRYTYFGQKEPIDLIEKMRGKCSLFPNEPRAPKLAYSAELFNLLNDLNNLSIEGEKLTSEQKAMILKIVHEKGKITPKQLAKEVGVSLEQIRGFRIDTKGSPLLSELTGYKMIREVLEKSNDEHLEDHVFYDEIAEILTKTKDIEGRKKQISELSSDLNEESVHQLAGLTKFTAYHSLSFKALRLINEEMLKTELNQMQSITLFGLKQNNELSVKGMKNIQADDTAILSPVAKRAQRETFKVVNRLREIYGEFDSIVVEMAREKNSEEQRKAIRERQKFFEMRNKQVADIIGDDRKINAKLREKLVLYQEQDGKTAYSLEPIDLKLLIDDPNAYEVDHIIPISISLDDSITNKVLVTHRENQEKGNLTPISAFVKGRFTKGSLAQYKAYCLKLKEKNIKTNKGYRKKVEQYLLNENDIYKYDIQKEFINRNLVDTSYASRVVLNTLTTYFKQNEIPTKVFTVKGSLTNAFRRKINLKKDRDEDYGHHAIDALIIASMPKMRLLSTIFSRYKIEDIYDESTGEVFSSGDDSMYYDDRYFAFIASLKAIKVRKFSHKIDTKPNRSVADETIYSTRVIDGKEKVVKKYKDIYDPKFTALAEDILNNAYQEKYLMALHDPQTFDQIVKVVNYYFEEMSKSEKYFTKDKKGRIKISGMNPLSLYRDEHGMLKKYSKKGDGPAITQMKYFDGVLGNHIDISAHYQVRDKKVVLQQISPYRTDFYYSKENGYKFVTIRYKDVRWSEKKKKYVIDQQDYAMKKAEKKIDDTYEFQFSMHRDELIGITKAEGEALIYPDETWHNFNFFFHAGETPEILKFTATNNDKSNKIEVKPIHCYCKMRLMPTISKKIVRIDKYATDVVGNLYKVKKNTLKFEFD

SEQ ID NO: 62 - protein, 1082 aa, Neisseria meningitidis
MAAFKPNPINYILGLDIGIASVGWAMVEIDEDENPICLIDLGVRVFERAEVPKTGDSLAMARRLARSVRRLTRRRAHRLLRARRLLKREGVLQAADFDENGLIKSLPNTPWQLRAAALDRKLTPLEWSAVLLHLIKHRGYLSQRKNEGETADKELGALLKGVADNAHALQTGDFRTPAELALNKFEKESGHIRNQRGDYSHTFSRKDLQAELNLLFEKQKEFGNPHISDGLKEGIETLLMTQRPALSGDAVQKMLGHCTFEPAEPKAAKNTYTAERFIWLTKLNNLRILEQGSERPLTDTERTTLIDEPYRKSKLTYAQARKLLELDNTAFFKGLRYGKDNAEASTLMEMKAYHAISRALEKEGLKDKKSPLNLSPELQDEIGTAFSLFKTDEDITGRLKDRVQPEILEALLKHISFDKFVQISLKALRRIVPLMEQGKRYDEACAEIYGDHYGKKNTEEKIDLPPIPADEIRNPVVLRALSQARKVINGVVRRYGSPARIHIETAREVGKSFKDRKEIEKRQEENRKDREKAATKFREYFPNFVGEPKSKDILKLRLYEQQHGKCLYSGKEINLGRLNEKGYVEIDHALPFSRTWDDSFNNKVLVLGSENQNKGNQTPYEYFNGKDNSREWQEFKARVETSRFPRSKKQRILLQKFDEEGFKERNLNDTRYVNRFLCQFVADHMLLTGKGKRRVFASNGQITNLLRGFWGLRKVRAENDRHHALDAVVVACSTVAMQQKITRFVRYKEMNAFDGKTIDKETGEVLHQKTHFPQPWEFFAQEVMIRVFGKPDGKPEFEEADTPEKLRTLLAEKLSSRPEAVHEYVTPLFVSRAPNRKMSGQGHMETVKSAKRLDEGVSVLRVPLTQLKLKDLEKMVNREREPKLYEALKARLEAHKDDPAKAFAEPFYKYDKAGNRTQQVKAVRVEQVQKTGVWVRNHNGIADNATMVRVDVFEKGDKYYLVPIYSWQVAKGILPDRAVVQGKDEEDWQLIDDSFNFKFSLHPNDLVEVITKKARMFGYFASCHRGTGNINIRIHDLDHKIGKNGILEGIGVKTALSFQKYQIDELGKEIRPCRLKKRPPVR

SEQ ID NO: 63 - protein, 1050 aa, Gluconacetobacter diazotrophicus
MGENMIDESLTFGIDLGIGSCGWAVLRRPSAFGRKGVIEGMGSWCFDVPETSKERTPTNQIRRSNRLLRRVIRRRRNRMAAIRRLLHAAGLLPSTDSDALKRPGHDPWELRARGLDKPLKPVEFAVVLGHIAKRRGFKSAAKRKATNISSDDKKMLTALEATRERLGRYRTVGEMFARDPDFASRRRNREGKYDRTTARDDLEHEVHALFAAQRRLGQGFASPELEEAFTASAFHQRPMQDSERLVGFCPFERTEKRAAKLTPSFERFRLLARLLNLRITTPDGERPLTVDEIALVTRDLGKTAKLSIKRVRTLIGLEDNQRFTTIRPEDEDRDIVARTGGAMTGTATLRKALGEALWTDMQERPEQLDAIVQVLSFFEANETITEKLREIGLTLAVLDVLLTALDAGVFAKFKGAAHISTKAARNLLPHLEQGRRYDEACTMAGYDHAASRLSHHGQIVAKTQFNALVTEIGESIANPIARKALIEGLKQIWAMRNHWGLPGSIHVELARDVGNSIEKRREIEKHIEKNTALRARERREVHDLLDLEDVNGDTLLRYRLWKEQGGKCLYTGKAIHIRQIAATDNSVQVDHILPWSRFGDDSFNNKTLCLASANQQKKRSTPYEWLSGQTGDAWNAFVQRIETNKELRGFKKRNYLLKNAKEAEEKFRSRNLNDTRYAARLFAEAVKLLYAFGERQEKGGNRRVFTRPGALTAALRQAWGVESLKKQDGKRINDDRHHALDALTVAAVDEAEIQRLTKSFHEWEQQGLGRPLRRVEPPWESFRADVEATYPEVFVARPERRRARGEGHAATIRQVKERECTPIVFERKAVSSLKEADLERIKDGERNEAIVEAIRSWIATGRPADAPPRSPRGDIITKIRLATTIKAAVPVRGGTAGRGEMVRADVFSKPNRRGKDEWYLVPVYPHQIMNRKAWPKPPMRSIVANKDEDEWTEVGPEHQFRFSLYPRSNIEIIRPSGEVIEGYFVGLHRNTGALTISAHNDPKSIHSGIGTKTLLAISKYQVDRFGRKSPVRKEVRTWHGEACISPTPPG

SEQ ID NO: 64 - protein, 1391 aa, Kordia algicida
MKKILGLDLGTNSIGWALVNEAEHEHEQSSIVKLGVRVNPLSVDEKTNFEKGRPLSINADRTSKRSARRNLQRFKLRRKNLINLLLKHHIISNETILTEVGKNTTHQTLKLRSKATQEKISLEEFARILLSINKKRGYKSSRKEKNEDEGFTIDGMAIAKELYDNQLTPGQYVYNILQDGKNYIPDFYRSDLQAEFDDVWQFQKKFYSSILTDEFYLKLKGQGKENTRKLFLAIHQVYTAENKGKRDAVKLQYYKWRSEAVKKQLSIEEVAYVLVEINNNINKSSGYLGAISDRSKALYFNNETVGEYLYGQLVKNRHNSLRNQVFYRQDYLDEFEKIWETQAKFYDELTNELKQEIRDVVIFYQRKLKSQKHLISDCLFEKHHKAIPKSSPLFQEFKIWQNLNYLEFVHTQSKEKIFFSELDDETRQFVFAELNIRGTLKIKEIKKLIGLETPVYWKSNFDEIEGNRTNQVLYNVYQNIADDLGYGFDWSKKHAFEINAELQAIFKDVGIDTAILNFDASIEENDFDKQKSYQLWHLLYSAEDTDKATEEDKLIYGNINTKLKKQLHQKYGFEAKYGNLLANISLQQDYGNLSAKAIKKILPYLESGNSFYEACTIVGYNPSNSLTKEQQQNRKLKDKLELLPKNSLRNPVVEKILNQKVNLINQLIDEYGKPDEVRIELARELKKSAKQRADLSKHINDATLKNQNIRKTLQKDFGIQNPSKNDVIRYKLYDELKDNGYKTLFTNKYIPKEQLFSKDVDIEHIIPKAILFDDSFSNKTLAYRNVNLAKADATAFDFISSKHLDDLDNYKARVETLFQSKRISKGKYKKLLMTRQNLPEDFIERDLRNSQYIAKKATAMLKEVFRSVVPTSGRITDKLREDWDLVNVMKELNLPKYRTLGLTEFIERKNGNKIEQIIDWTKRNDHRHHAMDALTVAFTTHNHIQYLNNLNVTHGLNGVDTDHEKSRLYAIKQAITKVYIVGKTKKRKFIPPMENFRSHAKNHLEGILISFKNKNKVVTKNKNRTKTKTKGVFNEKIQLTPRGQLHKETIYGHAKKVIVTKEKVSSKFTHEKILQVTKPAYREALLKRLASFKNDPKKAFSGKNALSKNPLYFDITSGKKVPDTVKLSYFENSYVIRKEVNSDNFKNEKSLQKVLDVGIRRILEKRLADYNGNAKEAFSNLEKNPIWKDKEKGVCIKKVRIEALKNAEPLHVKKDHLGKIILDDENKSTPVDFISTGNNHHVAIYEDKDGKLHDKVVSFYEVVSRVNLGLPIIDKSFNSHLDWKFLFSMKQNEMFVFPSEDFNPKEIDIGNPKNNELISKYLFRVQKFSKVTYGNSAVRDYVFRHHLETELIDKKELKGITYYQLKSIGMLEKLVKVRINHIGKIVHIGEY

SEQ ID NO: 65 - protein, 1116 aa, Clostridium spiroforme
MVEFLLKEMKIMGRLVLGLDIGITSVGYGVIDIDKNEFVDYGVRLFKEGTAINNEERRSKRGARRLKRRKTNRIADMKKLLERNGLIDEQYTALNNPYEIRKKGLKNKLSNYELATAILHITKNRGTCLESNADETQDEESTKNILSKNALELKDKYICEIQLARLEESGKIRGINNNFKTEDYLKELSKILENQDLEKETIDKIKEIVARRRRYDQGPGSEKSPTPYGSYRMENGELVHVNLIDMMRGKCSVFPDQLRAPQQSYSAELFNLLNDLNNLKINGEKLSSTEKQKIIDFVNEKGGITVKQLLKLIDVGITEISGFRIDKNEKPLITEFKGYKKVLKVFKNYNQESLLNDKSIVDTIMDINTKIKSIDERSDQLKQVLPSLDTSIINDLASIKGVSGYHSLSLKALNLINNEMLKTEMNQMQVLHQLDIFDKNRVSLKGQRQIYADDNAILSPVAKRAHRETFKVINKLRSIYGEFDSIVIETTRDKNTQDQKKRIKNNQKNYEERNTEVNNFLKEAGYNPENINAKTKMKIRLYIEQDAKSAYTLQDINLKELIEDEKAYEIDHIIPISISLDDSFNNKVLTTHDENQEKGNLTPISAFLKGKFHNGNLNTYKVFIQNNKNLNRKKKEYLLCEDDITRYEVVQNFINRNLVDTSYACRTVMNTLVHYFKDNEINTKVHTIKGQATSTFRKRIGLIKDREEDYFHHAIDALIVASLKKMNLINSYLMKVDFNEMYDEETGEIFNVLPDNSYLDEKYISFVSNLKNIYEESNKYIRGVMIKEKMTYPLIKVSHKIDTKPNRKISDDTIYSTRNVDNQDMLVERIKNIYDPKENAANTLINDIINDNTDKYIMYHKDPQTFDKIKAIVLNHFNEFKTDKNCYIVTKEGLYKLKGTSPLALYYEEFGPITKYAKKNNGPTIHSMKFYSEKLGNHLSITHKYSTVNKKVITKQISPYRTDFYQSPEGKYKFVTVRYKDVAYNAKKDKYIIDHSWYREQKKLKKIADEWIFVCSVHRDELIGIMKADGQKRIFDSSTESDGETLYHDAKTYEILKFTATNNDITGRFEVKPIYCYCKKQLMVSIGTCRKIQKFATDVLGNLYIVKDNVLKLEFK

SEQ ID NO: 66 - protein, 1348 aa, Finegoldia magna
MKSEKKYYIGLDVGTNSVGWAVTDEFYNILRAKGKDLWGVRLFEKADTAANTRIFRSGRRRNDRKGMRLQILREIFEDEIKKVDKDFYDRLDESKFWAEDKKVSGKYSLFNDKNFSDKQYFEKFPTIFHLRKYLMEEHGKVDIRYYFLAINQMMKRRGHFLIDGQISHVTDDKPLKEQLILLINDLLKIELEEELMDSIFEILADVNEKRTDKKNNLKELIKGQDFNKQEGNILNSIFESIVTGKAKIKNIISDEDILEKIKEDNKEDFVLTGDSYEENLQYFEEVLQENITLFNTLKSTYDFLILQSILKGKSTLSDAQVERYDEHKKDLEILKKVIKKYDEDGKLFKQVFKEDNGNGYVSYIGYYLNKNKKITAKKKISNIEFTKYVKGILEKQCDCEDEDVKYLLGKIEQENFLLKQISSINSVIPHQIHLFELDKILENLAKNYPSFNNKKEEFTKIEKIRKTFTFRIPYYVGPLNDYHKNNGGNAWIFRNKGEKIRPWNFEKIVDLHKSEEEFIKRMLNQCTYLPEETVLPKSSILYSEYMVLNELNNLRINGKPLDTDVKLKLIEELFKKKTKVTLKSIRDYMVRNNFADKEDFDNSEKNLEIASNMKSYIDFNNILEDKFDVEMVEDLIEKITIHTGNKKLLKKYIEETYPDLSSSQIQKIINLKYKDWGRLSRKLLDGIKGTKKETEKTDTVINFLRNSSDNLMQIIGSQNYSFNEYIDKLRKKYIPQEISYEVVENLYVSPSVKKMIWQVIRVTEEITKVMGYDPDKIFIEMAKSEEEKKTTISRKNKLLDLYKAIKKDERDSQYEKLLTGLNKLDDSDLRSRKLYLYYTQMGRDMYTGEKIDLDKLFDSTHYDKDHIIPQSMKKDDSIINNLVLVNKNANQTTKGNIYPVPSSIRNNPKIYNYWKYLMEKEFISKEKYNRLIRNTPLTNEELGGFINRQLVETRQSTKAIKELFEKFYQKSKIIPVKASLASDLRKDMNTLKSREVNDLHHAHDAFLNIVAGDVWNREFTSNPINYVKENREGDKVKYSLSKDFTRPRKSKGKVIWTPEKGRKLIVDTLNKPSVLISNESHVKKGELFNATIAGKKDYKKGKIYLPLKKDDRLQDVSKYGGYKAINGAFFFLVEHTKSKKRIRSIELFPLHLLSKFYEDKNTVLDYAINVLQLQDPKIIIDKINYRTEIIIDNFSYLISTKSNDGSITVKPNEQMYWRVDEISNLKKIENKYKKDAILTEEDRKIMESYIDKIYQQFKAGKYKNRRTTDTIIEKYEIIDLDTLDNKQLYQLLVAFISLSYKTSNNAVDFTVIGLGTECGKPRITNLPDNTYLVYKSITGIYEKRIRIK

SEQ ID NO: 67 - protein, 1129 aa, Streptococcus infantarius
MSNGKILGLDIGVASVGVGIIDSKTGNVIHANSRLFSAANAENNAERRGFRGARRLTRRKKHRVKRVRDLFEKYDISTDFRNLNLNPYELRVKGLTEQLTNEELFAALRTIAKRRGISYLDDAEDDSTGSSDYAKSIDENRRLLKTKTPGQIQLERLEKYGQLRGNFTVYDENGEAHRLINVFSTSDYKNEARKILETQSNYNKQITDEFIEDYIEILTQKRKYYHGPGNEKSRTDYGRFRTDGTTLENIFGILIGKCSFYPEEYRASKASYTAQEFNFLNDLNNLKVPTETGKLSTEQKEYLVDFAKKSKALGASKLLKEIAKIVDCSVDDIKGYRVDNKDKPDLHTFEPYRKLKFNLSSIDIDELSRETLDKLADILTLNTEREGIEDAIKRNLPSQFTEEQISEIVQIRKNQSSAFNKGWHSFSAKLMNELIPELYVTSEEQMTILTRLEKFKVNKKSSKNTKTIDEKEITDEIYNPVVAKSVRQTIKIINAAVKKYGDFDKIVIEMPRDKNAEDEKKFIDKKQKENKKEKDDSLKRAAFLYNGTDNLPDGVFHGNKELKTKIRLWYQQGERCLYSGKLISIHDLVHNSNKFEIDHILPLSLSFDDSLANKVLVYAWTNQEKGQKTPYQVIDSMDTAWSFREMKDYVLKQKGLGKKKCEYLLTTENIDKIEVKKKFIERNLVDTRYASRVVLNSLQTALKELGKDTKVSVVRGQFTSQLRRKWNIDKSRETYHHHAVDALIIAASSQLKLWQKQENPMFESYGENQVVNKETGEILSISDDKYKELVFQPPYQGFVNTISSKGFEDEILFSYQVDSKFNRKVSDATIYSTRKAKLGKDKKDETYVLGKIKDIYSQDGFDTFIKRYKKDKTQFLMYQKDPLTWENVIEVILRDYPSEKLSEDGKKTVKCNPFEEYRRENGLICKYSKKGNGTPIKSLKYYDKKLGNCIDITPEKSKNRVVLRQISPWRADIYFNLETLKYELMGLKYSDLSFEKGTGKYHISQEKYDAIREKEGIGKKSEFKFTLYRNDLILIKDTLNNCERMLRFGSKNDTSKHYVELKPLEKGTFDSEEEILPVLGKVAKSGQFIKGLNKPNISIYKVRTDVLGNKFFIKKEGDKPKLDFKNNNK

SEQ ID NO: 68 - protein, 1065 aa, Clostridium perfringens
MNKDINYALGLDIGITSVGWAVINLDLNRIEDLGVRIFNAAENLKDGSSLALPRRLARGRRRLLRRKAYRVERVRKLILKNNILTKEELEGLFKNKEVIDVWEARVKGLDYKLSREEWAKILINFCKRRGFKSNRKNEAKDKEAGQILSSISYNIEKMKETNSRTIGEYIYNEVKNSEDSYAPLRNKFGEYKMCVSRDVIREEIHTLFEKQRELGNNFASDEIEDKYFEIFNSQRPFSNFEDLEKLVGFCTFERKKHKRAPKHCISSEEFTLYEGINKLSIIKDGEKRKLSEEERTLVVNEAFNKKEIKYTTLRKLLGLSEEELFSTLTYSIDKDISKTENTKFVSLKGYHEIKRAIEKGVSKKAWQDIENNRNLLNDIAYVLTLGKTDDEIEKQLRLRNVPEELFESLLDMSFNKFNNLSIYALEKILPFMKEGYQYNEACEKAGYNFKAIYEGVRTKKLPVIEIDEIVNPVVNRALAQTRKVINSVIDKYGSPVRINIELARDLAKNFKDRKLIEKEQKENRANLDKIRENLRELMDKEPTVVEVLKYRLWEQQRGECAYTQSQIPLERLFSPGYCEIDHIIPFSRSFDDSLSNKILVLGSENQRKGNRTPYEYFGEDSERWNSFEIWVKGSYLNYKKKANLLKKKFSEEEQRDWKARNLQDTKYICRYISNFVNNRLEFKESENKQKVITVNGRATAYLRSRWGLNKVREDGDKHHALDAAVVGVTTQGMVQKISKYSKAHELYTVRKNDEFVDVETGECVDVDEYKEIRKDILPRPWRGFSEELKLRLSDNPLEELKKSPIETYNEEFIKENVKPIFVSRVPFRKISGKLFKETIYSERAFKDGYFVSKKSLVDLKRGDLDNFYNYECDKKLYDAISERMKEFNYNGKKAFESPFRKPTKSGKEGPVVRSVKIKSAVPFKDGIPMNEGLVAKEGMVRIDIYEKEGKYFVVPVYRYQLAKGIVPKRAAIAKKDELKWPIMDQTYNFKFSIYKNDLIEVKYDKKGVYFGYYDGFDRNSASLTIEKHDNSERYRSIGLKVGVLEINKYEVDVLGNYHKVKLGGN

SEQ ID NO: 69 - protein, 1195 aa, Elusimicrobium minutum
MQKNINTKQNHIYIKQAQKIKEKLGDKPYRIGLDLGVGSIGFAIVSMEENDGNVLLPKEIIMVGSRIFKASAGAADRKLSRGQRNNHRHTRERMRYLWKVLAEQKLALPVPADLDRKENSSEGETSAKRFLGDVLQKDIYELRVKSLDERLSLQELGYVLYHIAGHRGSSAIRTFENDSEEAQKENTENKKIAGNIKRLMAKKNYRTYGEYLYKEFFENKEKHKREKISNAANNHKFSPTRDLVIKEAEAILKKQAGKDGFHKELTEEYIEKLTKAIGYESEKLIPESGFCPYLKDEKRLPASHKLNEERRLWETLNNARYSDPIVDIVTGEITGYYEKQFTKEQKQKLFDYLLTGSELTPAQTKKLLGLKNTNFEDIILQGRDKKAQKIKGYKLIKLESMPFWARLSEAQQDSFLYDWNSCPDEKLLTEKLSNEYHLTEEEIDNAFNEIVLSSSYAPLGKSAMLIILEKIKNDLSYTEAVEEALKEGKLTKEKQAIKDRLPYYGAVLQESTQKIIAKGFSPQFKDKGYKTPHTNKYELEYGRIANPVVHQTLNELRKLVNEIIDILGKKPCEIGLETARELKKSAEDRSKLSREQNDNESNRNRIYEIYIRPQQQVIITRRENPRNYILKFELLEEQKSQCPFCGGQISPNDIINNQADIEHLFPIAESEDNGRNNLVISHSACNADKAKRSPWAAFASAAKDSKYDYNRILSNVKENIPHKAWRFNQGAFEKFIENKPMAARFKTDNSYISKVAHKYLACLFEKPNIICVKGSLTAQLRMAWGLQGLMIPFAKQLITEKESESFNKDVNSNKKIRLDNRHHALDAIVIAYASRGYGNLLNKMAGKDYKINYSERNWLSKILLPPNNIVWENIDADLESFESSVKTALKNAFISVKHDHSDNGELVKGTMYKIFYSERGYTLTTYKKLSALKLTDPQKKKTPKDFLETALLKFKGRESEMKNEKIKSAIENNKRLFDVIQDNLEKAKKLLEEENEKSKAEGKKEKNINDASIYQKAISLSGDKYVQLSKKEPGKFFAISKPTPTTTGYGYDTGDSLCVDLYYDNKGKLCGEIIRKIDAQQKNPLKYKEQGFTLFERIYGGDILEVDFDIHSDKNSFRNNTGSAPENRVFIKVGTFTEITNNNIQIWFGNIIKSTGGQDDSFTINSMQQYNPRKLILSSCGFIKYRSPILKNKEG

SEQ ID NO: 70 - protein, 1101 aa, Akkermansia muciniphila
MSRSLTFSFDIGYASIGWAVIASASHDDADPSVCGCGTVLFPKDDCQAFKRREYRRLRRNIRSRRVRIERIGRLLVQAQIITPEMKETSGHPAPFYLASEALKGHRTLAPIELWHVLRWYAHNRGYDNNASWSNSLSEDGGNGEDTERVKHAQDLMDKHGTATMAETICRELKLEEGKADAPMEVSTPAYKNLNTAFPRLIVEKEVRRILELSAPLIPGLTAEIIELIAQHHPLTTEQRGVLLQHGIKLARRYRGSLLFGQLIPRFDNRIISRCPVTWAQVYEAELKKGNSEQSARERAEKLSKVPTANCPEFYEYRMARILCNIRADGEPLSAEIRRELMNQARQEGKLTKASLEKAISSRLGKETETNVSNYFTLHPDSEEALYLNPAVEVLQRSGIGQILSPSVYRIAANRLRRGKSVTPNYLLNLLKSRGESGEALEKKIEKESKKKEADYADTPLKPKYATGRAPYARTVLKKVVEEILDGEDPTRPARGEAHPDGELKAHDGCLYCLLDTDSSVNQHQKERRLDTMTNNHLVRHRMLILDRLLKDLIQDFADGQKDRISRVCVEVGKELTTFSAMDSKKIQRELTLRQKSHTDAVNRLKRKLPGKALSANLIRKCRIAMDMNWTCPFTGATYGDHELENLELEHIVPHSFRQSNALSSLVLTWPGVNRMKGQRTGYDFVEQEQENPVPDKPNLHICSLNNYRELVEKLDDKKGHEDDRRRKKKRKALLMVRGLSHKHQSQNHEAMKEIGMTEGMMTQSSHLMKLACKSIKTSLPDAHIDMIPGAVTAEVRKAWDVFGVFKELCPEAADPDSGKILKENLRSLTHLHHALDACVLGLIPYIIPAHHNGLLRRVLAMRRIPEKLIPQVRPVANQRHYVLNDDGRMMLRDLSASLKENIREQLMEQRVIQHVPADMGGALLKETMQRVLSVDGSGEDAMVSLSKKKDGKKEKNQVKASKLVGVFPEGPSKLKALKAAIEIDGNYGVALDPKPVVIRHIKVFKRIMALKEQNGGKPVRILKKGMLIHLTSSKDPKHAGVWRIESIQDSKGGVKLDLQRAHCAVPKNKTHECNWREVDLISLLKKYQMKRYPTSYTGTPR

SEQ ID NO: 71 - protein, 1187 aa, Bifidobacterium longum
MLSRQLLGASHLARPVSYSYNVQDNDVHCSYGERCFMRGKRYRIGIDVGLNSVGLAAVEVSDENSPVRLLNAQSVIHDGGVDPQKNKEAITRKNMSGVARRTRRMRRRKRERLHKLDMLLGKFGYPVIEPESLDKPFEEWHVRAELATRYIEDDELRRESISIALRHMARHRGWRNPYRQVDSLISDNPYSKQYGELKEKAKAYNDDATAAEEESTPAQLVVAMLDAGYAEAPRLRWRTGSKKPDAEGYLPVRLMQEDNANELKQIFRVQRVPADEWKPLFRSVFYAVSPKGSAEQRVGQDPLAPEQARALKASLAFQEYRIANVITNLRIKDASAELRKLTVDEKQSIYDQLVSPSSEDITWSDLCDFLGFKRSQLKGVGSLTEDGEERISSRPPRLTSVQRIYESDNKIRKPLVAWWKSASDNEHEAMIRLLSNTVDIDKVREDVAYASAIEFIDGLDDDALTKLDSVDLPSGRAAYSVETLQKLTRQMLTTDDDLHEARKTLFNVTDSWRPPADPIGEPLGNPSVDRVLKNVNRYLMNCQQRWGNPVSVNIEHVRSSFSSVAFARKDKREYEKNNEKRSIFRSSLSEQLRADEQMEKVRESDLRRLEAIQRQNGQCLYCGRTITFRTCEMDHIVPRKGVGSTNTRTNFAAVCAECNRMKSNTPFAIWARSEDAQTRGVSLAEAKKRVTMFTFNPKSYAPREVKAFKQAVIARLQQTEDDAAIDNRSIESVAWMADELHRRIDWYFNAKQYVNSASIDDAEAETMKTTVSVFQGRVTASARRAAGIEGKIHFIGQQSKTRLDRRHHAVDASVIAMMNTAAAQTLMERESLRESQRLIGLMPGERSWKEYPYEGTSRYESFHLWLDNMDVLLELLNDALDNDRIAVMQSQRYVLGNSIAHDATIHPLEKVPLGSAMSADLIRRASTPALWCALTRLPDYDEKEGLPEDSHREIRVHDTRYSADDEMGFFASQAAQIAVQEGSADIGSAIHHARVYRCWKTNAKGVRKYFYGMIRVFQTDLLRACHDDLFTVPLPPQSISMRYGEPRVVQALQSGNAQYLGSLVVGDEIEMDFSSLDVDGQIGEYLQFFSQFSGGNLAWKHWVVDGFFNQTQLRIRPRYLAAEGLAKAFSDDVVPDGVQKIVTKQGWLPPVNTASKTAVRIVRRNAFGEPRLSSAHHMPCSWQWRHE

SEQ ID NO: 72 - protein, 166 aa, uncultured Termite
MNKVQEIEYKKIREKLADREYRIGLDLGVGSIGYVVVSLKECNDLSYLPEDIILSGSRIFKSSIGAVERREFRLQRNSHRHHRERMRFLWQLLAEKQLALQSSKDLEKKENSADCETSQKRFPINILKEDPYILRYKALEEKLSLFQLGYVLYHIANHSNTAYENT

SEQ ID NO: 73 - protein, 1032 aa, uncultured Termite
MLYHIANHRGTDSVRSFLEYDDDKIKENTLTAKIAKETKKVIDAKKYRTFGEYLYKGKIEKFQQNIRKKVSNRKTPANKNKEFAVTRDVIIKETEKILASQKQYYTYILTDEYIKKIKDAISYQTEKLIPESGYCPYFKDEKRLPRSHKLNEYRRMYEALNNAKYFDPVLDENTGEILSYQEKEFSREEKKILFDEVLLKGMELTESGAKKLLYHLPDGCEVQLQGRDKTTQKIKGYALVDLEASPFWLRLSQQQQDEFLYDWNSLPLEKLKPKLTNYYSLTESEVDETFQEIKLPSNYASVGKKAMEILLTYIKDGCSYTEALEKAVSEGKLKVDKQTMIYDSLPYYGKILKESTQKLIGKAFSKQFADRNYKEPDTNKNEREFGKIANPVVHQTLNELRKLINEIITVFGKKPLEIGLETTRELKKSKKNREYLSKQQNKNEYARNRIYKEYIEPHLSQIKSRQENPSKYISKFELLEEQNFICPFCSEKITPDDIINSKVDVEHIFPIEESEDITKNNLVIAHNECNADKGKKSPFDAFGDKTSGKYRWNCILHNAQKNLPHKVWRFYQGSLEKFLENKPMSRRFGTDNSYISKIAARYLACLFNDPYHSEIFCIKSSLIAQLRIAWDLNSIMVPLVKNILSEKELEEFKISKNKKIRIDNRHHALDAIVIAYANRGYHNFLNRIHAKEYKINYREKSWLSKILLPPLNRDLEDFKISVKDSIEKANVSIKHDHNTNGSLVKATAYKVYYSGAGEYIITTSKNVEEISFKEKEDPKDTLYRALCKFECRDIDIKDEKLIKKLKYNSTLYKKVQNNLSKAKQELEQDNKKTEEEGKKSQKITEVRIYKKACSLVKGQYIQCGSRLKDKFFAVKEPTEIKTGLGYDTGDNLFLDLYYDKTGKLCGEIIRKVNFNRNKPNYQKEGYTLFERIYQSDILEVDTSEDRISLKNKTGSAPSDRTFIKVNTFTEVNAYFDGKRDKIQIFFGNLLKSSFKNDSFFISSMQKYNVRKVILTSLGIIKYRSQILKNKEV

SEQ ID NO: 74 - protein, 1032 aa, uncultured Termite
MKKRILGLDIGIASVGWALVEFDDEFQDNKKKGTIIKSGVRIFTRAETPKERESLAKPRREARSQRRRIRRRVERLNSIRELFVKNGVVEEWSVSKKNPNNIYITLNQIKTPWQLRMESLDRKLTNEQFAVVLTHLAKHRGYKSLRKDDKAGKVLEAISQNKKRLNDSDYRTLGEMFCKNESYKEHKRNKGGEYINSVARELIEEEVEKIFVKQREKGNNFADVNTEREYLKIAFSQKPAGSISKMVGFCTFENGEKRAPRDSYSAELFKVLCTINNTTFTDMKTGEIRSFSKEEIGKTLETVKNVKDVKYAKIRKDLGLEDSVKFSGVDYRENAKSKGEGEIFVSMKTYHEIKSKIEKLSKEKWDNLKGNTELLDSIVNIIANLKDDESIKKEFQKLKIDEDIIDVLLNFEFKKFINLSFKALRKIIPFQFQGQKYITASTSAGYSLKQEGIKNKLVPPAKENINVAVVARAFAQTRKVINAVIRKYGQFDQINIELATELKNSKFDRSKIEEGQKKFQSQKDKIFKEVQELRGGMTPSSSLLLKYRLWREQDERCVYSGRKISFEDLLDTGFLDIDHIIPYSKSMDDSFNNKVLCLAEENRNKKNDIPFNYYQRIDRDWNLLISIITSMKNMKIAKKSRLLKQELSDIEGFIERNINDTRYATRYIKDFLENNLEFKENEFIKVKVQARSGGLTSVLSYNWGMSKDREESYFHHAKDAIIVACSTQGMVQYISKISQQYENDKDKMKKIKDKTENCIPKPWDSFRADVEESIEGIFVSFAPRHKVTGSAHKETIYSKKHLEKERYVTVKKSLDKIKLSDLENIPCNENCGIIRVLKERLEKFKNDSLKAFADPVHMPTKCPNKKGPVIRSVKIKESNKTGIEVRKGLAERGEMVRVDVFIKDKKYYLVPIYVSDFKNKDLPNKAIAALKLENEWIMIDKTYSFKFSLFKDDLIKIKKKKEEIFGYFGGVHRSTGTIKIKSRHKPKEIDEGIGSRCLLDFRKFQVDVLGNYTEVKHEKRMPAYITRKDKKH

SEQ ID NO: 75 - protein, 1361 aa, Lactobacillus casei
MTKLGKPYGIGVDIGSNSIGFAAVDENSHLIRLKGKTVIGARLFEEGKAAADRRASRTTRRRLSRNRWRLSFLRDFFESHITPTGPNFFMRQKYSEISPKDKARYKYEKRLFNDRTDAEFYQQYPTMYHLRNRLLTDPSKADVREIYFAIHHILKSRGHFLTSGYAKDFNTNKVALNEIFPALQDAYAQVYPDLDITFDENKVNEFKTVLLNEKATPSDTQRALVNLLLAEDGDKDILKQQKQVLTEFAKAVVGLKTKLNVALGTEVDSSEATVWNFSLGQLDDKWAGIESAMTDEGTEILDQIRDLYRARLLNGIVPAGKTLSQAKVDDYAQHHEDLELFKDYLKQLEDDGTAKAIRQLYDRYIDGDDAKPFVREDFVKALTKEVTAHPNAKSPELLERLAQPDFMLKQRNKANGAIPVQMQQRELDQIIKNQSVYYDWLAAPNPVEKHRKSMPYQLDELLNFRIPYYVGPLVTAKEQKAAQGGVFAWMVRKDPDGNITPYNFDEKVDREASANTFIQRMKTTDTYLIGEDVLPKQSLLYQRYEVLNELNNVRVNNEKLSIEQKQQVIRELFERHNSVTIKQFAENLRAHGDYAHIPEIRGLADEKRFLSSLSTYRQLKSLLPDAIDDPAKQADIENIIAWSTVFEDAAIFKTKLKEINWLDSQTITKLSNIRYRGWGQFSHKFLNGLTLGNGHTIIQELFLSNNNLMQILTDETLQKKMTELNADKLKAANINDAIDDAYTSPSNKKALRQVLRVIEDIKRAADGQDPSWLYVETADGGGTPGKRTRARQHQLQEIYANAAHELIDSAVRGELEDKIADKADFNDRLVLYFMQGGRDIYTGTPLNIDQLSSYDIDHILPQSLIKDNSLDNRVLVHAIINREKNATFASTIYAQKMNATWRQWHEAGLISGRKLRNLQMRPDQIDKYASGFVARQLVETRQIIKLTEQIVAAQYPETKIIAVKAGLSHQLREELEFPKNRDVNHYHHAFDAFLAARIGTYLLKRFPNLQAFFTYGKFKKADVKKLRGFNFIRDITHAEDKIVVKDTGEVIWDKKRDVDELDRIYNFKRMLITHEVHFEKADLFKQTVYGAKDSKEAGGKKQLISKKKGYPVDIYGGYTQETGSYLSVVRLTKKAMYAVVKVSTRDAAKLAVAKSISEQKENETLNDIIDEKLSKISKNGKITHELFEVVLPRVGQKTLFKNSKYNLFLVNSDTYMHNYQELWMPREYQKMWKDISLSKYGDAQTEDQLDQIFGFIVSQVNSYFNLYDINQFRKKLNDAADKFATLPMRDTDDMQGKIATIGQLLIGLQANAARSDLRNLDIKTPLGLLQIPNGISLDSDTSVVYQSPTGLLEREVHLSDL

SEQ ID NO: 76 - protein, 1348 aa, Streptococcus equi
MKKPYTIALDIGTNSVGWVVVTDDYRVPTKKMKVLGNTERKTIKKNLIGALLFDSGDTAEGTRLKRTARRRYTRRKNRLRYLKEIFTEEMAKVDDGFFQRLEDSFYVLEDKEGNKHPIFANLADEVAYHKKYPTIYHLRKELVDNPQKADLRLIYLAVAHIIKFRGHFLIEGTLSSKNNNLQKSFDHLVDTYNLLFEEQRLLTEGINAKELLSAALSKSKRLENLISLIPGQKKTGIFGNIIALSLGLTPNFKANFGLSKDVKLQLAKDTYADDLDSLLAQIGDQYADLFLAAKNLSDAILLSDILTESDEITRAPLSASMVKRYREHHKDLVTLKTLIKDQLPEKYQEIFLDKTKNGYAGYIEGQVSQEEFYKYLKPILARLDGSEPLLLKIDREDFLRKQRTFDNGSIPHQIHLEELHAILRRQEVFYPFLKDNRKKIESLLTFRIPYYVGPLARGHSRFAWVKRKFDGAIRPWNFEEIVDEEASAQIFIEKMTKNDLYLPNEKVLPKHSLLYETFTVYNELTKVKYATEGMTRPQFLSADQKQAIVDLLFKTNRKVTVKQLKENYFKKIECWDSVEITGVEDSFNASLGTYHDLLKIIQDKDFLDNPDNQKIIEDIILTLTLFEDKKMISKRLDQYAHLFDKVVLNKLERHHYTGWGRLSGKLINGIRDKQSGKTILDFLKADGFANRNFMQLIHDSELSFIDEIAKAQVIGKTEYSKDLVGNLAGSPAIKKGISQTIKIVDELVKIMGYLPQQIVIEMARENQTTAQGIKNARQRMRKLEETAKKLGSNILKEHPVDNSQLQNDKRYLYYLQNGKDMYTGDDLDIDYLSSYDIDHIIPQSFIKNNSIDNKVLTSQGANRGKLDNVPSEAIVRKMKGYWQSLLRAGAISKQKFDNLTKAERGGLTQVDKAGFIQRQLVETRQITKHVAQILDSRFNTEFDDHNKRIRKVHIITLKSKLVSDFRKEFGLYKIRDINHYHHAHDAYLNAVVAKAILGKYPQLAPEFVYGDYPKYNSFKERQKATQKMLFYSNILKFFKDQESLHVNSDGEEIWNANKHLPIIKNVLSIPQVNIVKKTEVQTGGFYKESILSKGNSDKLIPRKNNWDTRKYGGFDSPTVAYSVLVIAKMEKGKAKVLKPVKEMVGITIMERTAFEENPVVFLEARGYREIQEHLIIKLPKYSLFELENGRRRLLASASELQKGNELFLPVDYMTFLYLAAHYHELTGSSEDVLRKKYFVDRHLHYFDDIIQMINDFAERHILASSNLEKINHTYHNNSDLPVNERAENIINVFTFVALGAPAAFKFFDATIDRKRYTSTKEVLNATLIHQSVTGLYETRIDLSQLGEN

SEQ ID NO: 77 - protein, 1341 aa, Ruminococcus lactaris
MGKGYYVGLDMGTGSVGWAVTDESYQILRRHGKAMWGVRLFESAKTAEERRMFRTGRRRLDRRGWRIEILQEIFAEEISRVDPGFFLRMKESKYYPEDKRDIQGNCPELPYTLFVDKTFTDKDFHKKYPTIYHLRKMLMETEDTPDMRLVYLALHHMMKHRGHFLLSGDISQVTEFKNTFNQFIENIRNEEMDFEIELDESAVQMIEETLKDKNLTRSAKKSKLVKGLNAKNVRDKAFLTLLSGGTVKLSDLFGMEELNEGERPKISFADNGYEEYAAVVEMELGELYYIVESAKAVYDWAILSDILGGSTSVSDAKVRAYEKHKADLKYLKAVVKEYFPKEVYNAVFVESSDKLNNYPAYIGMTKKNGKKVSLEGKRCSREEFMDFLKKNIVVKLPDEEAKMYLQSELEKDSFLPKQVNKDNGVIPYQVHKYELKKILDNLGDKIPFLKENAEKIEKLFSFRIPYYVGPLRTGNGENSKFAWAERKSTEKIYPWNFENVIDVEQSAENFIRRMTNKCTYLIGEDVLPKDSLLYSKFMVLNELNNLRLDGQKISVELKQKIYRDVFCRSRKVTQKKLKSYLIREGIAGKNVELTGIDGDFKGSLTAYHDFKEKLIDVELTQKEKEEIILNIVLFGDDKKLLKQRLKKKFPQLTEKQINTVTALSYKGWGRLSKKLLEEVTVPAPETGEVWNIITALWETNDNFMQLLSKEYQFSDRIEEFNEEKADPEVSYQTIEDLYVSPAVKRQIWQTLQIIQEIEKVMGEKPKRVFVEMAREKQENKRTESRKKTLSDLYTKCKKEEPEWIEALCTSLEKHEEHQLRSDKLYLYYTQKGRCMYSGEPIDLEDLWDNTKYDIDHIYPQSKTMDDSLKNRVLVKKEYNAKKSDTYPIAADIQKKMMPFWKSLLTGGFIPKEKYDRLVRNNPLDANELAGFIERQIVETRQSTKAVAEILKKILPDTEIVYVKAKTVSKFRQDFDFIKVRDMNDLHHAKDAYLNIVVGNVYFVKFTKNAAWFVKENPGRTYNLEKMFIWDVARDGEIAWKAGKSGSIVQVRAMMEKNHILVTRRSYEVKGGLFDQQILKKGKGQVPVKESDERLRDIGKYGGYNKAAGVYFMLVSSKDKKGKEQRTIEFVPIYLKDRVEKDMESARNYLMEERGLREPKILIKKIKIDTLFKVDGFYMWLSGRTSNQLIFKGANQLILSKEDMKTLKKVVKYIQRQKEDKNVKISMRDGITEEELLKLYETFLDKIRHSIYGARLSSQEKTLVNGKEKFIDLSVEAKCQVLYEILHLFQCQSGAANLKMIGGPASAGILVMNNNISKCKNISIVNQSPTGIYEKEIDLLRV

SEQ ID NO: 78 - protein, 1003 aa, Gluconacetobacter diazotrophicus
MIDESLTFGIDLGIGSCGWAVLRRPSAFGRKGVIEGMGSWCFDVPETSKERTPTNQIRRSNRLLRRVIRRRRNRMAAIRRLLHAAGLLPSTDSDALKRPGHDPWELRARGLDKPLKPVEFAVVLGHIAKRRGFKSAAKRKATNISSDDKKMLTALEATRERLGRYRTVGEMFARDPDFASRRRNREGKYDRTTARDDLEHEVHALFAAQRRLGQGFASPELEEAFTASAFHQRPMQDSERLVGFCPFERTEKRAAKLTPSFERFRLLARLLNLRITTPDGERPLTVDEIALVTRDLGKTAKLSIKRVRTLIGLEDNQRFTTIRPEDEDRDIVARTGGAMTGTATLRKALGEALWTDMQERPEQLDAIVQVLSFFEANETITEKLREIGLTLAVLDVLLTALDAGVFAKFKGAAHISTKAARNLLPHLEQGRRYDEACTMAGYDHAASRLSHHGQIVAKTQFNALVTEIGESIANPIARKALIEGLKQIWAMRNHWGLPGSIHVELARDVGNSIEKRREIEKHIEKNTALRARERREVHDLLDLEDVNGDTLLRYRLWKEQGGKCLYTGKAIHIRQIAATDNSVQVDHILPWSRFGDDSFNNKTLCLASANQQKKRSTPYEWLSGQTGDAWNAFVQRIETNKELRGFKKRNYLLKNAKEAEEKFRSRNLNDTRYAARLFAEAVKLLYAFGERQEKGGNRRVFTRPGALTAALRQAWGVESLKKQDGKRINDDRHHALDALTVAAVDEAEIQRLTKSFHEWEQQGLGRPLRRVEPPWESFRADVEATYPEVFVARPERRRARGEGHAATIRQVKERECTPIVFERKAVSSLKEADLERIKDGERNEAIVEAIRSWIATGRPADAPPRSPRGDIITKIRLATTIKAAVPVRGGTAGRGEMVRADVFSKPNRRGKDEWYLVPVYPHQIMNRKAWPKPPMRSIVANKDEDEWTEVGPEHQFRFSLYPRSNIEIIRPSGEVIEGYFVGLHRNTGALIPTPVGPDSYVIA

SEQ ID NO: 79 - protein, 1368 aa, Streptococcus pyogenes
MDKKYSIGLDIGTNSVGWAVITDDYKVPSKKFKVLGNTDRHSIKKNLIGALLFDSGETAEATRLKRTARRRYTRRKNRICYLQEIFSNEIAKVDDSFFHRLEESFLVEEDKKHERHPIFGNIVDEVAYHEKYPTIYHLRKKLADSTDKADLRLIYLALAHMIKFRGHFLIEGDLNPDNSDVDKLFIQLVQTYNQLFEENPINASRVDAKAILSARLSKSRRLENLIAQLPGEKRNGLFGNLIALSLGLTPNFKSNFDLAEDAKLQLSKDTYDDDLDNLLAQIGDQYADLFLAAKNLSDAILLSDILRVNTEITKAPLSASMIKRYDEHHQDLTLLKALVRQQLPEKYKEIFFDQSKNGYAGYIDGGASQEEFYKFIKPILEKMDGTEELLAKLNREDLLRKQRTFDNGSIPHQIHLGELHAILRRQEDFYPFLKDNREKIEKILTFRIPYYVGPLARGNSRFAWMTRKSEETITPWNFEEVVDKGASAQSFIERMTNFDKNLPNEKVLPKHSLLYEYFTVYNELTKVKYVTEGMRKPAFLSGEQKKAIVDLLFKTNRKVTVKQLKEDYFKKIECFDSVEISGVEDRFNASLGTYHDLLKIIKDKDFLDNEENEDILEDIVLTLTLFEDREMIEERLKTYAHLFDDKVMKQLKRRRYTGWGRLSRKLINGIRDKQSGKTILDFLKSDGFANRNFMQLIHDDSLTFKEDLQKAQVSGQGDSLHEHIANLAGSPAIKKGILQTVKVVDELVKVMGRHKPENIVIEMARENQTTQKGQKNSRERMKRIEEGIKELGSDILKEYPVETTQLQNEKLYLYYLQNGRDMYVDQELDINRLSDYDVDHIVPQSFLKDDSIDNKVLTRSDKNRGKSDNVPSEEVVKKMKNYWKQLLNAKLITQRKFDNLTKAERGGLSELDKAGFIKRQLVETRQITKHVAQILDSRMNTKYDENDKLIREVRVITLKSKLVSDFRKDFQFYKVREINNYHHAHDAYLNAVVGTALIKKYPKLESEFVYGDYKVYDIRKMIAKSEQEIGKATAKYFFYSNIMNFFKTEITLANGEIRKRPLIETNGETGEIVWDKGRDFATVRKVLSMPQVNIVKKTEVQTGGFSKESILPKRNSDKLIARKKDWDPKKYGGFDSPTVAYSVLVVAKVEKGKSKKLKSVKELVGITIMERSSFEKDPVDFLEAKGYKEVRKDLIIKLPKYSLFELENGRKRMLASAGELQKGNELALPSKYVNFLYLASHYEKLKGSPEDNEQKQLFVEQHKHYLDEIIEQISEFSKRVILADANLDKVLSAYNKHRDKPIREQAENIIHLFTLTNLGAPAAFKCFDTTIGRNRYKSIKEVLDATLIHQSITGLYETRIDLSQLGGD

SEQ ID NO: 80 - protein, 1504 aa, Bacteroides dorei
MKNIVGLDLGTNSIGWAVVNGSVNDDGSEQLVKIQASGSRIIPMDAAMIGDFNKGNSISQTAERTRLRGVRRLSERYLLRRERLHRILDILGFLPFHFAQDLDRHGKIVKGKEPKLAWRKNEAGQFEFIFQDSFKEMLEDFKLNYPNLITDDKKVPYDWTIYYLRKKGLTSKISKEELAWILLNFNQKRGYYQLRGEEEEENKDKLVEFYALKVVAVEDSGEKKGKDIWYNVHLENGWVYRRTSNMSLDWVGKTKEFIVTTDLEKDGTPKKDKEGNVKRSFRAPKEDDWSLVKKKTEADIDQTHKTVGAYIYDTLLGNPSQKIRGRLVRTIERKYYKEELKLILEKQKEFHLELQDRALYAACIEELYPINEAHRNNVGNRDFTYLFLEDILFYQRPLKSKKSLIDNCPYEENQGLDKETGEIKSFPVKCIAKSHPLFQEFRLWQFIINLRIYRKDLAQDVDVTNELLKTEEDYVALFDWLNGKKEIDQKAFLKYPVFGLKKEIENYRWNYVQDKPYPCNETRSLMLARLEKCDISIEFLTKENEEALWHILYSVEDKNEIVKALQKFADKHDLNASFVDVFQKFPPFKKEYGSYSAKAIKKLLPLMRMGKYWSENSIDKGTRERIDKIITGEYDEKIENRVREKAIHLADVSDFKGLPLWLVCYIVYGRHSEAKEIIQWKSPADIDSYLRSFKQHSLRNPIVEQIIIETLRVVRDIWKQVGNIDEIHVELGREMKNPADKRKKMTQQMSENENTNLRIKYLLTEFLNPEYEVENVRPYSPSQQDILRIYEEGVLNSVSDLPEEISDILKKFTETDLKKRPSRSEVLRYKLWLEQKYRSPYTGEVIPLGKLFTPAYEIEHVIPQSYYFDDSFSNKVICEAEVNKLKSNLLGHEFIVKHHGEIVELPFGKKVRIFTVDEYEQFVKDNYSRTRSKMKKLLMDDIPEEFVTRQLNDSRYISKVVKSLLSNIVREKGEEEAISKNVIPCTGGVTDRLKKDWGINEVWNKIILPRFQRLNELTGTNKFTTKNVGIQEIPTMPLELQKGFNKKRIDHRHHAMDAIIIACANRNIINYLNNKSATAKAELSRYDLQKMLCDKAKTDNNGNYKWVIRKPWASFTQDTYLALENIIVSFKQNLRVINKATNRFLHYNEEGKKIFVKQGKGDNWAIRKSMHKDTVFGEVNLRRIKTVALNEAMKNPQSIVVKDFKRKLLELWNLGFDAKRIKKYFEDNRETWSDINLSKIEVYYFSKDTKDRFFATRKPLDTSFDRKKIENNITDTGIQKILLRHLELKDNNPDIAFSPDGIDEMNRNIIQLNNGKYHQPIIKIRWYEQADKFAVGQTGNKSSKFVEAAKGTNLFFAVYESNILDKKTNTIIKKRNYATIPLNVAIERQKQGLPVAPEDENGNDPIFVLSPNDLVYLPTDDELANGIIAQPLDRGRIYKMVSSSGEQCFFIKHIVANVLVDKFEFSPLNKMERALTGEMIKMICIPIKVDRLGNVLESSSSYKK

SEQ ID NO: 81 - protein, 1426 aa, Capnocytophaga sputigena
MKNILGLDLGITSISFAHIVEDENKEKSEIKELGVRIVSLTTDEQSDFEKGKSITTNANRTLKHGARLNLDRYQQRRKYLIDLLQKANLITSSSILAENGKNTTHSTWQLRAKAVTERIEKEEFARVLLAINKKRGYKSSRKAKTEDEGQAIDGMAIAKRLYDENLTPGQLSLQLLQQNKKLLPDFYRSDLQREFDLVWNFQKQFYPDILTDSFYKELQGKGKDATSKAFSKRYHFDTAENKGSKESVRLQAYQWRAEAISKQLSKEEVAYVLTEINNNLNNASGYLGAISDRSKELYFNRQTVGQYLYAQLQENRHNSLKNKVFYRQDYLDEFERIWETQASFHKELTDELKKQIRDVVIFYQRKLKSQKGLISFCEFESKEIEIEKDGKTITKTIGARVVPKSSPLFQEFKIWQILNNVTCKRKGIRKKKSSAKSTELDLFNEPSQTIFSLDMECKQLLFDELNLKGDLKSDKVLKLLGYSPQEWEINYNQLEGNRTQKALYEAYLKIVEMEAHDVKDILQIKSAKDDWSLDESPLSASEIKEKVKDIFQALGICTKILYFDPLLPVKEFEKQDSYQLWHLLYSYESDDSTSGNETLYRILEKKYAFKREHARILANVALQDDYGSLSTKAIRKIYPNIKENQYSKACELAGYKHSKLSLTTEELEARELKNIIPLLKKNALRNPVVEKILNQMINVVNALIEKNSERDAEGKITKYFHFDEIRIELARELKKNAQKRYEMTQNINKAKLEHQKISEILQKKFGIKNPTKSDIIRYRLYQELEHNGYKELYTNAPIARDMLFSKNIEIEHIVPKARVFDDSFSNKTLTFHRINSNKGEYTAFDYITSLNSEEELNQYLTRVENAYKTKSISLTKYKNLLKKASEIGDGFINRDLRDTQYIAKKAKEILFQVTKNVLSTSGSITDRLREDWGLVDVMKELNMPKYQSLGLTEVEERKEGNKVTVIKNWTKRNDHRHHAMDALTVAFTKPSYIQYLNHLNARKDENNKNYSVILAIEEKETIKVPTNNGKNKRVFIEPIPNFRQVAKKHLEEIFISHKAKNKVVTKNVNKPAGTDKQQITLTPRGQLHKETIYGKYQYYVNKEEKVGVKFDERTITKVSNPLYREALLKRLQANDNDPKKAFTGKNALSKNPIYLDETKTKTLPEKVNLTYLEEDFSIRKDISPDNFKDLKSIEKVIDQGVKRILIKRLQDYDNDPKKAFVDLEKNPIWLNKEKGIAIKRVTISGVSNAQPLHIGKDHLGKTTLNKEGNEIPVDYVSTGNNHHVAIYRDKEGNLQEQIVSFFEAVVRTQQGLPIIDKTYKQEEGWQFLFTMKQNEMFVFPNATTGFNPAEIDLLDPKNKKLISPNLFRVQKIATKDYFFRHHLETNVETDNVLKNTTWKREGLSGLKDIVKVRINHLGDIVSIGEY

SEQ ID NO: 82 - protein, 1443 aa, Parabacteroides johnsonii
MIKLLYLEKLKQYTMKKILGLDLGTSSIGWALVNEAENSDEVSSIIKLGVRVNPLTVDEMQNFEKGKSITTNADRTLKRSMRRNLQRYKLRRDALIELLKKVGFITDKTILSEQGNRTTFETYRLRAKAAEEEISLKELARVLLMINKKRGYKSSRKAKGEEEGALIDGMEIAKKLYDEDLTPGQLCLQLLESGKKFFPDFYRSDLQEEFNKIWDFQKQFNLFSFCDVAKEEVKGKNKSQTWAILAKYFVETKKVNVWNEHEAQTENREEVYKLVGLKRTVKGEELKKENYRWRVQALTEQLDLEKIAVVLQEINGQISASSGYLGAISDRSKVLYFNRQTVGQYQMAELNKNPNMSLRNMVFYRQDYLDEFNVIWEKQAEFHKELTPELKKEIRDIIIFYQRRLKSQKGLISFCEFENREVVVEKEGKKQTKIIGCKVIPRSHPLFQEFKIWQTLNNIEVFVGEKKGKRKKSNVSSDLFGDTEDALITEGRRFLYQEEKKILAKELSIKKGLTKAEILRLLFENPQELDINFKQIDGNQTGFALFSAYSNMIEKYGYEPLDFKKPAEDLISQLKTVFTDLGWNTDLLFIDLDKENKEWEKQPYFRLWHLLYSFEGDNTPTGNGKLIEKIMQLCGIEKEYAIELANVSLQDDYGSLSAKAIKKILLYLKEGNQYDMACEYAGYRHSKSSLTKEEIENKVLKDKLEILPKNSLRNPVVEKILNQMVNVINTVMEVYGRPDEIRVELARELKKSAKEREELTKAVAKNTREHEEIRKVLQSEFGMINVSRNDIIRYKLYEELKDNGYKTLYSNQYIPREKLFSKEIDIEHIIPQSRLFDDSLSNKTLEYKSINIEKGNKTAYDFVKEKYGEEGLQQYLNRCENLCKDKKAKLRKLKMELNEIPDGFIDRDLRNTQYIAKKALSMLTEICRRVVATTGSITDKLREDWQLVDVMKELNLPKYEALGLVEVYEDKDGRKIKRIKDWTKRNDHRHHAMDALTVAFTKDVFIQYFNNKNAAWESDSKEHTNIVGIKTRYFESGKAVPPIPLGQFRVEAKCHLENLLVSIKAKNKVVTTNVNCIKKKGGTYKNTQQTPRGQLHLETIYGSHNQYVTKIEKVNASFDAVKIATVSKQDYRNALLKRLEVFGNDPKKAFTGKNSLEKNPIYLDRAQTIQVPDKVQTVELETAYTIRKPVDPTLNVDKVVDKKIRLILEQRLKEYGGDAKKAFVNLDENPIWLNEEKGISIKRVTIRGISKAQALHDKKDKDGNFILDETGKRIPVDFVNTGNNHHVAIYRKPVLDKKGQVIFDDEGNPMYELDEDVVPFFEAVTRANLGIPIIDKDYKKSEGWQFLFSMKQNEYFVFPNEKTGFNPKEVDLLDPDNYAMISPNLFRVQKIGLNDYTFRHHLETTIQNDLKFITWIRCGKSGIKDIVKVRINHIGQIVSVGEY

SEQ ID NO: 83 - protein, 984 aa, Campylobacter jejuni
MARILAFDIGISSIGWAFSENDELKDCGVRIFTKVENPKTGESLALPRRLARSARKRLARRKARLNHLKHLIANEFKLNYEDYQSFDESLAKAYKGSLISPYELRFRALNELLSKQDFARVILHIAKRRGYDDIKNSDDKEKGAILKAIKQNEEKLANYQSVGEYLYKEYFQKFKENSKEFTNVRNKKESYERCIAQSFLKDELKLIFKKQREFGFSFSKKFEEEVLSVAFYKRALKDFSHLVGNCSFFTDEKRAPKNSPLAFMFVALTRIINLLNNLKNTEGILYTKDDLNALLNEVLKNGTLTYKQTKKLLGLSDDYEFKGEKGTYFIEFKKYKEFIKALGEHNLSQDDLNEIAKDITLIKDEIKLKKALAKYDLNQNQIDSLSKLEFKDHLNISFKALKLVTPLMLEGKKYDEACNELNLKVAINEDKKDFLPAFNETYYKDEVTNPVVLRAIKEYRKVLNALLKKYGKVHKINIELAREVGKNHSQRAKIEKEQNENYKAKKDAELECEKLGLKINSKNILKLRLFKEQKEFCAYSGEKIKISDLQDEKMLEIDHIYPYSRSFDDSYMNKVLVFTKQNQEKLNQTPFEAFGNDSAKWQKIEVLAKNLPTKKQKRILDKNYKDKEQKNFKDRNLNDTRYIARLVLNYTKDYLDFLPLSDDENTKLNDTQKGSKVHVEAKSGMLTSALRHTWGFSAKDRNNHLHHAIDAVIIAYANNSIVKAFSDFKKEQESNSAELYAKKISELDYKNKRKFFEPFSGFRQKVLDKIDEIFVSKPERKKPSGALHEETFRKEEEFYQSYGGKEGVLKALELGKIRKVNGKIVKNGDMFRVDIFKHKKTNKFYAVPIYTMDFALKVLPNKAVARSKKGEIKDWILMDENYEFCFSLYKDSLILIQTKDMQEPEFVYYNAFTSSTVSLIVSKHDNKFETLSKNQKILFKNANEKEVIAKSIGIQNLKVFEKYIVSALGEVTKAEFRQREDFKK

SEQ ID NO: 84 - protein, 1082 aa, Neisseria meningitidis
MAAFKPNPINYILGLDIGIASVGWAMVEIDEDENPICLIDLGVRVFERAEVPKTGDSLAMARRLARSVRRLTRRRAHRLLRARRLLKREGVLQAADFDENGLIKSLPNTPWQLRAAALDRKLTPLEWSAVLLHLIKHRGYLSQRKNEGETADKELGALLKGVADNAHALQTGDFRTPAELALNKFEKESGHIRNQRGDYSHTFSRKDLQAELILLFEKQKEFGNPHVSGGLKEGIETLLMTQRPALSGDAVQKMLGHCTFEPAEPKAAKNTYTAERFIWLTKLNNLRILEQGSERPLTDTERATLMDEPYRKSKLTYAQARKLLGLEDTAFFKGLRYGKDNAEASTLMEMKAYHAISRALEKEGLKDKKSPLNLSPELQDEIGTAFSLFKTDEDITGRLKDRIQPEILEALLKHISFDKFVQISLKALRRIVPLMEQGKRYDEACAEIYGDHYGKKNTEEKIYLPPIPADEIRNPVVLRALSQARKVINGVVRRYGSPARIHIETAREVGKSFKDRKEIEKRQEENRKDREKAAAKFREYFPNFVGEPKSKDILKLRLYEQQHGKCLYSGKEINLGRLNEKGYVEIDHALPFSRTWDDSFNNKVLVLGSENQNKGNQTPYEYFNGKDNSREWQEFKARVETSRFPRSKKQRILLQKFDEDGFKERNLNDTRYVNRFLCQFVADRMRLTGKGKKRVFASNGQITNLLRGFWGLRKVRAENDRHHALDAVVVACSTVAMQQKITRFVRYKEMNAFDGKTIDKETGEVLHQKTHFPQPWEFFAQEVMIRVFGKPDGKPEFEEADTPEKLRTLLAEKLSSRPEAVHEYVTPLFVSRAPNRKMSGQGHMETVKSAKRLDEGVSVLRVPLTQLKLKDLEKMVNREREPKLYEALKARLEAHKDDPAKAFAEPFYKYDKAGNRTQQVKAVRVEQVQKTGVWVRNHNGIADNATMVRVDVFEKGDKYYLVPIYSWQVAKGILPDRAVVQGKDEEDWQLIDDSFNFKFSLHPNDLVEVITKKARMFGYFASCHRGTGNINIRIHDLDHKIGKNGILEGIGVKTALSFQKYQIDELGKEIRPCRLKKRPPVR

SEQ ID NO: 85 - protein, 1021 aa, Clostridium cellulolyticum
MKYTLGLDVGIASVGWAVIDKDNNKIIDLGVRCFDKAEESKTGESLATARRIARGMRRRISRRSQRLRLVKKLFVQYEIIKDSSEFNRIFDTSRDGWKDPWELRYNALSRILKPYELVQVLTHITKRRGFKSNRKEDLSTTKEGVVITSIKNNSEMLRTKNYRTIGEMIFMETPENSNKRNKVDEYIHTIAREDLLNEIKYIFSIQRKLGSPFVTEKLEHDFLNIWEFQRPFASGDSILSKVGKCTLLKEELRAPTSCYTSEYFGLLQSINNLVLVEDNNTLTLNNDQRAKIIEYAHFKNEIKYSEIRKLLDIEPEILFKAHNLTHKNPSGNNESKKFYEMKSYHKLKSTLPTDIWGKLHSNKESLDNLFYCLTVYKNDNEIKDYLQANNLDYLIEYIAKLPTFNKFKHLSLVAMKRIIPFMEKGYKYSDACNMAELDFTGSSKLEKCNKLTVEPIIENVTNPVVIRALTQARKVINAIIQKYGLPYMVNIELAREAGMTRQDRDNLKKEHENNRKAREKISDLIRQNGRVASGLDILKWRLWEDQGGRCAYSGKPIPVCDLLNDSLTQIDHIYPYSRSMDDSYMNKVLVLTDENQNKRSYTPYEVWGSTEKWEDFEARIYSMHLPQSKEKRLLNRNFITKDLDSFISRNLNDTRYISRFLKNYIESYLQFSNDSPKSCVVCVNGQCTAQLRSRWGLNKNREESDLHHALDAAVIACADRKIIKEITNYYNERENHNYKVKYPLPWHSFRQDLMETLAGVFISRAPRRKITGPAHDETIRSPKHFNKGLTSVKIPLTTVTLEKLETMVKNTKGGISDKAVYNVLKNRLIEHNNKPLKAFAEKIYKPLKNGTNGAIIRSIRVETPSYTGVFRNEGKGISDNSLMVRVDVFKKKDKYYLVPIYVAHMIKKELPSKAIVPLKPESQWELIDSTHEFLFSLYQNDYLVIKTKKGITEGYYRSCHRGTGSLSLMPHFANNKNVKIDIGVRTAISIEKYNVDILGNKSIVKGEPRRGMEKYNSFKSN

SEQ ID NO: 86 - protein, 1131 aa, Acidovorax ebreus
MAQHVFGLDIGIASVGWAILGEQRIIDLGVRCFDKAETAKEGDPLNLTRRQARLLRRRLYRRAWRLTQLSRLLKRKGLIADAKLFAKAPSYGDSAWELRRQGLDRLLTPLEWARVIYHQCKHRGFHWTSKAEEAKADSDAEGGRVKQGLAHTKALMQAKNYRSAAEMVLAEFPDAQRNKRGQYDKALSRVLLGEELALLFATQRRLGNPHASDFFEKLILGDGDRKSGLFWQQKPALSGADLLKMLGKCTFEKGEYRAPKASFSVERHVWLTRLNNLRIVVDGRSRPLNEAERQAALLLPYQTETSKYKTLKNAFIKAGLWGDGVRFGGLAYPSQAQIDAEKTKDPEDQFLVKLPAWHELRKAFKAAGHEALWQQISTPALDGDPTLLDQIATVLSVYKDGAEVVQQLRQLALPEPAASIAVLEKISFDKFSSLSLKALRRIVPLMQSGLRYDEAVAQIPEYGHHSQRIEPGAAKHLYLPPFYEAQRKYAGKGDHIGSMQFRDDADIPRNPVVLRALNQARKVVNALIREYGSPIAVNIEMARDLSRPLDERNKVKRAQEEFRDRNDRARSEFERDFGYKPKAAAFEKWMLYREQLGQCAYSQQPLDIQRVLDDHNYAQVDHALPYSRSYDDSKNNKVLVLTHENQNKGNRTAFEYLTSFPDGEDGERWRTFVAWVQGNKAYRMAKRNRLLRKNYGVDESKGFIDRNLNDTRYICKFFKNYVEEHLQLAARADGDTARRCVVVNGQLTAFLRARWGLTKVRGDSDRHHALDAAVVAACTHGMVKALADYSRRKEISFLQEGFPDPETGEILNPAAFDRARQHFPEPWTHFAHELKARLFTDDLAALREDMQRLGSYTTEDLGRLRTLFVSRAPQRRSGGAVHKETIYAQPESLKQQGGVIEKILLTSLKLQDFDKLLNPESNDHFVEPHRNERLYAAIRQRLEQFGGRADKAFGPDNLFHKPDKNNQPTGPVVRSIKLVRGKQTGIPIRGGLAKNDSMLRVDIFTKAGKFHLVPVYVHHRVTGLPNRAIVAFKDEDEWTLIDESFAFLFSVYPNDYVKVTLKKEQQSGYYSGADRSTGAMNLWAHDRAASVGKDGLIRGIGVKTALSVEKFNVDVLGRIYLAPPETRSGLA

SEQ ID NO: 87 - protein, 1122 aa, Streptococcus suis
MSNGKILGLDIGIASVGVGVIDAQTGEIIHASSRIFPSANAANNAERRTFRGSRRLIRRKKHRIKRLDDLFNDFHINLDGEMSTDNPYVLRVKGLSQKLTVEELYISIKNIMKRRGISYLDDAESDNEAGRSDYAKAIERNRQLLTSKTPGEIQLERLEKYGQLRGNFTIIDEEGQSQQIINVFSTSDYVKEVEKILDCQKMYHKFISDEFCDKLIELLREKRKYYVGPGNEKSRTDYGIYRTDGTTLENLFGILIGKCTFYPDQYRSSRASYTAQEFNFLNDLNNLTVPTETKKLSQEQKEFLVNYAKETSVLGAGKILQQIAKLADCKVEDIRGYRLDNKDKPELHTFETYRAMKGLVPLVDIGVLSREQLDILADILTLNTDFEGIREALKKQLPNVFDEKQVKGLASFRKSKSQLFAKGWHNLSQKIMLEVIPELYATSDEQMTILTRLGKFEKSSVAEYPSSINVDEITDEIYNPVVAKSIRQTIKIINASIKKWGEFDQIVIEMPRDRNEDEEKKRIADGQKANAKEKADSILRAAELYCAGKVLPDYVYNGHNQLATKIRLWYQQGERCIYTGQPISIHDLIHNQNQYEIDHILPLSLTFDDSLSNKVLVLATANQEKAQRTPYNYLKSATSAWSYREFKDYVTKRKGIGKKKCEYLTFEEDINGFEVRSKFIQRNLVDTRYASKVILNALQDYFKISGIQTKVSVVRGQFTSQLRHKWGIEKTRETYHHHAVDALIIAASSQLRLWKKQESPLVVDYQEGRQVDLETGEILELTDEQYKELVYQPPYQGFVNTISSSAFDNEILFSYQVDSKVNRKISDATIYATRNAQLGKDKTEGIYVLGKIKDIYTQAGYEAFLKRYTKDKTSFLMYHKDLDTWEKVIEIILRDYREYDEKGKEIGNPFERYRRENGYVKKYSRKGNGTAIKSLKYYDNKLGNHIDITPENSRNAVVLQSLKPWRTDVYFNKETGKYEFLGIKYSDLSFEKGTGEYGISQEKYDSIKIAEGVAKKSIFKFTLYKQDLLFIKDIENNFGKLLRFTSKNDTSKHYVELKPYDKNKFGTEEPLLPVLGNVAKSGQCIKGLNKSNISIYKVRTDILGYRHFIKQEGEHPQLKFKK

SEQ ID NO: 88 - protein, 1509 aa, Bacteroides coprophilus
MKKTLGLDLGTNSIGWAVINSNIDSEGKEKLVGISSCGSRIIPMDATTLGDFGKGNTKSPVAERTRLRGIRRLLERSLLRRERLHRVLSVMGFLPEHYASQLDRYGKFLPETEPKLAWYKDDSGRYQFLFQKSFHEMLEDFRQHQPELVAGEKKIPYDWTIYYLRKKALSQEITKEELAWILLNFNQKRGYYQLRGEEEQEENNKSVEYHALKVVSVEDSGERKGKDIWYNVTLENGWVYRRASNIPLDWTGKVKEFVVTTELDDAGNPKKDKEGNVKRSFRAPKEDDWGLLKTRTQAQIDESGKTVGTYIYESLLCMPNQKIRGKLVRTIERKYYKDELRQILVKQSEFHAALQDHNLLLSCIEELYPNNEAHRRLLSASSFIYFLIEDILFYQRPLKSQKGLIDNCPYESHIYKDKKDGSLHHVPLKCVSKSHPLFQEFRLWQFLSNLRIYQRERMMDGSLKLDVDVTREFLPSEEDYVKLFDWLNERKEISQKFLLAYKPFGLKKNEQANYRWNYVEDKSYPCNETRAEIKSRLSKAGVPEEFLTEEKEEALWHILYSISDKKELTKALGTFAAKNCLNESFVEVFAKIPPFESNYAAYSLKAIRKLLALMRMGKYWNEQAIDRQTRDRIEKILTGEYDETIRSRVREKAMLLTDISSFRGLPLWLACYIVYDRHSESKELVKWETPADIDHFLSKFKQNSLRNPIVEQVITESLRTVRDIWKQEGKIDEIHVELGREMKNPAKERARITAQVQENENTNLRIKALLAEFMNPEFEIENVHPYSPGQQEILRIYEDGVLSGIAEKDLPDDITAILKKFRENDVKKRPTTSEVLRYKLWLEQRYRSPYTGRVIPLGKLFTPAYEIEHVIPQSRYFDDSISNKVICESAVNKLKDNCLGYEFIKKHSGEMVELGNGETVPVFSVEEYERFVKESYFGNSKKMKKLLLEDIPDSFIERQLNDSRYISRVVTSLLSNLVCEEGEQDGLSKNVIVCTGGITDRLKKDWGVQEVWNRIILPRFLRLNEITGRTDFTSTSVNGHLLPALPLYLQKGFNKKRIDHRHHAMDAIVIACANRNIVNYLNNSSARKNSEISRYDLQRLLCEKVKTDANGNYKWILRKPWETFTQDVYAALTNIVVSFKQNLRVINRTTNYYQHYNEAGEKRMIPQTKGDRWAIRKPMHKDTVYGEVNLRKEKTLPLRDVVKNPSIVVDKSLKNKLYELLKSQYDLKAIAKYFETHQDVWADVNLKKIKVYYFTKETNERFFATRKSLDPSFDQKKIEEEVTDTGVQKILLHHLQQNNNDPDMAFSPDGIDRMNQNMTILNDGKWHQPIYKVRTYEKADKFAVGESGNKAKKFVEAAKGTNLFFAVYESVQEDEAIGKQVCKRTFATIPLNEVIKRKKQGLPAAPEDLNGNLPKFVLSPNDLVYLPTEEERNSSRIIQPLDRERIYKMVSSSGSQCFFIKVFVANSIWDKNEYSSLNKMERAITNEMIKEICVPIKIDRLGNVSLIQI

SEQ ID NO: 89 - protein, 1219 aa, Bacteroides cellulosilyticus
MKEEVRGKNRSQTWAILAKFFVWSEKESVWNEKEARTEERVKEYKLVGLKRDTKGNELKLENYRWRVQALSEQLNPEIVAIVLQEINGQISASSGYLGAISDRSKQLYFNRQTVGQYLMSELEKDPNVSLRNRVFYRQDYLDEFDRIWEKQAEFHEELTVELKKEIRDIIIFYQRRLKSQKGLISFCEFEKREVVVEEDGRKKNKTVGCRVIPRSHPLFQEFKIWQTLNDIEVFAWDKQSKRKKADKSSILFDNSEDALLVEGKRFLYQEEKELLAKELFVKESMKKAEVLKLLFENYQELDLNFKQIDGNHTGFALFSAYSKMIEKYGYEPVDFKRSADEIIEKLETIFTNLGWNTELLSIDLSKEDKELERQSYFRLWHLLYSFEGDNTPTGNGKLLEKIMQLCDVEKEYAVELANVSFQEDYGSLSAKAIKKILPYLKEGNQYDVACDYAGYRHSRSSLTKDEIENKILKDKLEILPKNSLRNPVVEKILNQMVNLINTLIDTYGKPDEIRVELARELKKNAKEREELTKSIARNTREHDEIRQLLRTEFGMMNVSRNDIIRYKLYEELKDNGYKTLYSNEYIPREKIFSKEIDIEHVIPQARLFDDSLSNKTLEYRAINIEKGNKTAYDFVKEKYGNDGLEKFLNRCETLFKDKRTKLRKLKMEEKDIPEGFIDRDLRNTQYISKKAFAMLNEISRRVVATTGSITDKLREDWQLVDLMKELNLPKYEKLGMVEMFEDKDGRKIKKITDWTKRNDHRHHAVDALTVAFTKDVFIQFYNNKNAAWMPASKEHANITGIKARYFENGKALAPMPLAQFRAEAKRHLENLLVSIKAKNKVITSNVNRTKNKNGENRKLQQTPRGQLHLETVYGSHRQYATKIEKVNAAFDVTKIATVSKLAYRNALLKRLEAFGNDPKKAFTGKNTLEKNPLYLDENQTEMVPEKVQTVEFETVYTIRKPIDPNLSIDKVVDVKIRSVLEKRLKEYGGDAKKAFVNLDENPIWLNEAKGISIKRVSIRGISNAQSLHEKKDKDGNLILGKEGRKIPVDFVNTGNNHHVAIYKKPVLDKVGQVVLDEEGNPKYELDEVVVSFFDAVTRANLGQPIIDKDYRRSEGWQFLFSMKQNEYFVFPNDKTGFNPKEVDLLNPENYALISPNLFRVQKFAYKNYVFRHHLETTIKDTSSTLKGITWTDFRSSKGLDKIVKVRVDHIGQIVSIGEY

SEQ ID NO: 90 - protein, 1329 aa, Catenibacterium mitsuokai
IVDYCIGLDLGTGSVGWAVVDMNHRLMKRNGKHLWGSRLFSNAETAANRRASRSIRRRYNKRRERIRLLRAILQDMVLEKDPTFFIRLEHTSFLDEEDKAKYLGTDYKDNYNLFIDEDFNDYTYYHKYPTIYHLRKALCESTEKADPRLIYLALHHIVKYRGNFLYEGQKFNMDASNIEDKLSDIFTQFTSFNNIPYEDDEKKNLEILEILKKPLSKKAKVDEVMTLIAPEKDYKSAFKELVTGIAGNKMNVTKMILCEPIKQGDSEIKLKFSDSNYDDQFSEVEKDLGEYVEFVDALHNVYSWVELQTIMGATHTDNASISEAMVSRYNKHHDDLKLLKDCIKNNVPNKYFDMFRNDSEKSKGYYNYINRPSKAPVDEFYKYVKKCIEKVDTPEAKQILNDIELENFLLKQNSRTNGSVPYQMQLDEMIKIIDNQAEYYPILKEKREQLLSILTFRIPYYFGPLNETSEHAWIKRLEGKENQRILPWNYQDIVDVDATAEGFIKRMRSYCTYFPDEEVLPKNSLIVSKYEVYNELNKIRVDDKLLEVDVKNDIYNELFMKNKTVTEKKLKNWLVNNQCCSKDAEIKGFQKENQFSTSLTPWIDFTNIFGKIDQSNFDLIENIIYDLTVFEDKKIMKRRLKKKYALPDDKVKQILKLKYKDWSRLSKKLLDGIVADNRFGSSVTVLDVLEMSRLNLMEIINDKDLGYAQMIEEATSCPEDGKFTYEEVERLAGSPALKRGIWQSLQIVEEITKVMKCRPKYIYIEFERSEEAKERTESKIKKLENVYKDLDEQTKKEYKSVLEELKGFDNTKKISSDSLFLYFTQLGKCMYSGKKLDIDSLDKYQIDHIVPQSLVKDDSFDNRVLVVPSENQRKLDDLVVPFDIRDKMYRFWKLLFDHELISPKKFYSLIKTEYTERDEERFINRQLVETRQITKNVTQIIEDHYSTTKVAAIRANLSHEFRVKNHIYKNRDINDYHHAHDAYIVALIGGFMRDRYPNMHDSKAVYSEYMKMFRKNKNDQKRWKDGFVINSMNYPYEVDGKLIWNPDLINEIKKCFYYKDCYCTTKLDQKSGQLFNLTVLSNDAHADKGVTKAVVPVNKNRSDVHKYGGFSGLQYTIVAIEGQKKKGKKTELVKKISGVPLHLKAASINEKINYIEEKEGLSDVRIIKDNIPVNQMIEMDGGEYLLTSPTEYVNARQLVLNEKQCALIADIYNAIYKQDYDNLDDILMIQLYIELTNKMKVLYPAYRGIAEKFESMNENYVVISKEEKANIIKQMLIVMHRGPQNGNIVYDDFKISDRIGRLKTKNHNLNNIVFISQSPTGIYTKKYKL

SEQ ID NO: 91 - protein, 1152 aa, Roseburia inulinivorans
MNAEHGKEGLLIMEENFQYRIGLDIGITSVGWAVLQNNSQDEPVRITDLGVRIFDVAENPKNGDALAAPRRDARTTRRRLRRRRHRLERIKFLLQENGLIEMDSFMERYYKGNLPDVYQLRYEGLDRKLKDEELAQVLIHIAKHRGFRSTRKAETKEKEGGAVLKATTENQKIMQEKGYRTVGEMLYLDEAFHTECLWNEKGYVLTPRNRPDDYKHTILRSMLVEEVHAIFAAQRAHGNQKATEGLEEAYVEIMTSQRSFDMGPGLQPDGKPSPYAMEGFGDRVGKCTFEKDEYRAPKATYTAELFVALQKINHTKLIDEFGTGRFFSEEERKTIIGLLLSSKELKYGTIRKKLNIDPSLKFNSLNYSAKKEGETEEERVLDTEKAKFASMFWTYEYSKCLKDRTEEMPVGEKADLFDRIGEILTAYKNDDSRSSRLKELGLSGEEIDGLLDLSPAKYQRVSLKAMRKMQPYLEDGLIYDKACEAAGYDFRALNDGNKKHLLKGEEINAIVNDITNPVVKRSVSQTIKVINAIIQKYGSPQAVNIELAREMSKNFQDRTNLEKEMKKRQQENERAKQQIIELGKQNPTGQDILKYRLWNDQGGYCLYSGKKIPLEELFDGGYDIDHILPYSITFDDSYRNKVLVTAQENRQKGNRTPYEYFGADEKRWEDYEASVRLLVRDYKKQQKLLKKNFTEEERKEFKERNLNDTKYITRVVYNMIRQNLELEPFNHPEKKKQVWAVNGAVTSYLRKRWGLMQKDRSTDRHHAMDAVVIACCTDGMIHKISRYMQGRELAYSRNFKFPDEETGEILNRDNFTREQWDEKFGVKVPLPWNSFRDELDIRLLNEDPKNFLLTHADVQRELDYPGWMYGEEESPIEEGRYINYIRPLFVSRMPNHKVTGSAHDATIRSARDYETRGVVITKVPLTDLKLNKDNEIEGYYDKDSDRLLYQALVRQLLLHGNDGKKAFAEDFHKPKADGTEGPVVRKVKIEKKQTSGVMVRGGTGIAANGEMVRIDVFRENGKYYFVPVYTADVVRKVLPNRAATHTKPYSEWRVMDDANFVFSLYSRDLIHVKSKKDIKTNLVNGGLLLQKEIFAYYTGADIATASIAGFANDSNFKFRGLGIQSLEIFEKCQVDILGNISVVRHENRQEFH

SEQ ID NO: 92 - protein, 686 aa, Coprococcus comes
MKKQDSPKNNMGYTAYNLNVLGYEEFAKRVELLFKDTDAVKRLNDSHMQMAEGFDLNALPGSPALRRGVSQAIKVLDDIVSVAGKAPDRIYLKVTRTASNSRKGKRTAKRSDKIKQALKALDADAAADLGAAKLLRELGMFDEKEINERIYLYFHQAGKCLYTGKPIDITRIASNDYYVDHVVPLAYRKDESLDNKVLVYAEASRYKSETLLVSPAVQRKMLPFWRMLRNAGLMSERKLNALIRTEISEGMLKSIIGRQFTENSWEAKLFTAAIAAKYPGTVVIPVKAGVIGAVRSRIGIPKSLKANQFYHAHDALLAAEVGRYMELAKPAFVHNRVKYEQYMRKIKLVNEENKKAPKSQLDFFAGGFFFDRVDKDTGEVYWNKDEEVERIYRACGWKNLRVTYAAFEDGGAFWKQTIYSPREKSKLIATKSDRPAEIYGGYSSQTFANFFVYEVMKKKVKQLRFGAVPAAIASKSDPDTYNAMLEMYARGLAKTAKEKFVRIVRARVLKNTMIELYGERFRIAGEKQVYPVRQMPLAIDEVYLLKGVETIAAAGNAGASAKIDFEKAAESLVGFWDLLLEKLPVNYPKLTVQLKLGLLKHPKDILAATSESEFPAIVYKIAEAEIQVMEQASGLRNMSDTKILGGNTFGGSLVFTFNKVLNDPKSKACFIDTTPAGLYEVKTKIW

SEQ ID NO: 93 - protein, 1105 aa, Actinomyces coleocanis
MDNKNYRIGIDVGLNSIGFCAVEVDQHDTPLGFLNLSVYRHDAGIDPNGKKTNTTRLAMSGVARRTRRLFRKRKRRLAALDRFIEAQGWTLPDHADYKDPYTPWLVRAELAQTPIRDENDLHEKLAIAVRHIARHRGWRSPWVPVRSLHVEQPPSDQYLALKERVEAKTLLQMPEGATPAEMVVALDLSVDVNLRPKNREKTDTRPENKKPGFLGGKLMQSDNANELRKIAKIQGLDDALLRELIELVFAADSPKGASGELVGYDVLPGQHGKRRAEKAHPAFQRYRIASIVSNLRIRHLGSGADERLDVETQKRVFEYLLNAKPTADITWSDVAEEIGVERNLLMGTATQTADGERASAKPPVDVTNVAFATCKIKPLKEWWLNADYEARCVMVSALSHAEKLTEGTAAEVEVAEFLQNLSDEDNEKLDSFSLPIGRAAYSVDSLERLTKRMIENGEDLFEARVNEFGVSEDWRPPAEPIGARVGNPAVDRVLKAVNRYLMAAEAEWGAPLSVNIEHVREGFISKRQAVEIDRENQKRYQRNQAVRSQIADHINATSGVRGSDVTRYLAIQRQNGECLYCGTAITFVNSEMDHIVPRAGLGSTNTRDNLVATCERCNKSKSNKPFAVWAAECGIPGVSVAEALKRVDFWIADGFASSKEHRELQKGVKDRLKRKVSDPEIDNRSMESVAWMARELAHRVQYYFDEKHTGTKVRVFRGSLTSAARKASGFESRVNFIGGNGKTRLDRRHHAMDAATVAMLRNSVAKTLVLRGNIRASERAIGAAETWKSFRGENVADRQIFESWSENMRVLVEKFNLALYNDEVSIFSSLRLQLGNGKAHDDTITKLQMHKVGDAWSLTEIDRASTPALWCALTRQPDFTWKDGLPANEDRTIIVNGTHYGPLDKVGIFGKAAASLLVRGGSVDIGSAIHHARIYRIAGKKPTYGMVRVFAPDLLRYRNEDLFNVELPPQSVSMRYAEPKVREAIREGKAEYLGWLVVGDELLLDLSSETSGQIAELQQDFPGTTHWTVAGFFSPSRLRLRPVYLAQEGLGEDVSEGSKSIIAGQGWRPAVNKVFGSAMPEVIRRDGLGRKRRFSYSGLPVSWQG

SEQ ID NO: 94 - protein, 1361 aa, Anaerococcus tetradius
MGNYYLGLDIGTNSVGWAVTDENYNIERFKKKNMWGIRLFDEAKTAESRRIHRQARRMRQRKIQRLNLLMELFDVEISKVDESFFIRKKESDLHYEDKSQDSRYALFNDKEFNDKDYHNKYPTIFHLIMDLIENDEKKDIRLLYLACHYLIKNRGHFIFEGQKFDVNSSLNNNINKLKSHLDQFYNICLDFDNDKLIEILVNQNLNISEKSKKIKELLRKTNLEVGIANLIAGGSIKLSNMFDDDELKNLDYNSLSFKNSNFDEGRELFEEVLEDRFELVEILKDIHDASVLETMLSSASISPDGGKYISSSMINSYNKHKRDLKLLKKIIKKYKKSEYDNIFRDENIKNNYLSYTRTGINKNKKVQAEDNTDSDGFYKYIVKILKDIKENDSDEDIKYILSEIDKKNFVPKQRTKENSVIPYQLREIELRKIIDNQSKYHKFLNEVDEKGISVKEKIISLLTFRIPYYIGPLNPSYNEEKNFTTSWVKRLAKGKVTPWNFEDMVDIDASREAFIENKLNKCSFLLDETVLPKDSLLYQEYMVLNELNNLKINGQSINTDLKKSIYEELFKKYKKVTRKRLISYIKEKENMSGDIVITGIDGDFKQGLKSYIAFKDIIGEKIDDDIYRKEVEKIIRDISLYGDDKSFIQKKIKNENKLDLSDDQISKIAKLKFKDWGRFSKKLLVGIKASDKNTGEIDNIIGFMRNYNYNIMQLMANVFTFKDEIEKLNSKYYTDEKINIDYLDDLYLSSPAKRMLWQSFQIVDEIKNIKNSDPKKIFIEMARSKEDKPTRKMSRKSRLEKLYTDSKKQFIKLFGPDEYDKLNNEIKNKSESDFRWDNLYLYYTQFGRCMYSLDPIDLEELSNKNLYDQDHIYPKSKIYDDSIENRVLVKKQLNLDKSNEYPIPDRVLNKDKNKLLAFWKMLNEKELIGDKKYARLIRKSPFTDEELGDFIARQLVETRQATKETANMLKRLCPDSKIVYVKAKNVSDFRRKFDILKCRSINDLHHAHDAYLNIVVGNVFDTKFTSNPLNFIKNNSKNRSYNLEKIYDYDVIRNEKIAWLAERKEENQDGSIATVLKNLSKNDIRVTRRTYIKCEDLFDENIVRKGNGKFPIKENNNKSDTNKYGGYSGIKNAYFVLLEDEKHNRILEAIPSFIYKKEKNGEKGSVINYLQNILGIKSAKILRDKIKIGSLLKIDKFPYNLAGKSGNGILISGGVQLILDKNTSKYIKKIENYKYKLDENKDYQINIFDKLSKEENIKLFDLFVDKFENSIYKNRVNIKLKEIKLARPKFEHLSIEEQIKTLTQMLILFGRENNAVNLEYIGLPKNTGKTKINKKINNKDIKIINQSITGLYETEEDLANI

SEQ ID NO: 95 - protein, 1377 aa, Lactobacillus brevis
MESNHDGEQVKYTLGLDIGTSSIGYAAIDKHQKPIRAKGKHVIGVRLFQEGQTAADRRAFRTTRRRLKRRKWRLNLLNRLFDPYLSEVDPNFLPRLRQSNLSPKDDNKHFNGSTLFPDKTDAAFYRQYPTMYHLRYALMTEKRKFDIREVYLAIHHIVKYRGNFLNSATVDSFKTSNIDFTSQFDRLNELYRQVILDEPFQINMDQVDEMTNKLLDNDALKLDTQKQVAKLLPVIYNDKPIDKQYTRIATEFSKAILGYKTKLDVILNLDTQNAKDWVIRLDDEDIDDKLPALVENLDESRQEIVTIIRDLYAQITLNAIVPKGKSLSESMVDKYNDHKDHLDLLMGLIHELGDDSAKGIKLREAYTQYVGKSDDKTLNQDDFYAAIKKNLDEDSKRSPKIQRLIEQASFMPKQRTSANGVIPHQLHQLELDRIIENQGRYYPFLKKPNPNTHKPNGGKYKLDELVAFRIPYYVGPLITKRDQEKTSGADFAWMIRKPGQEGEITPWNFDQKVDRMASANRFIRRMTTKDSYLVAEDVLPDASLIYEKFKALNELNMLKVNDSRLSPSQKQDLFNNLFKKQKTIRTKKLQTYIRTNWELPSVMISGLADPDKFNSSLSTYIDFRDIFGEKVDDPNRQADYEEIIEWSTVFEDRKIYQAKLNQLDWLTEPQRKALLTKRYTGWGRLSKKLLTGLKDQNGDSILDQLWKTNDNFMQIQSRDEFAKQIHDENAKQFHEANNVDDILDDAFTSPQNKKAIRQVDKVVQDVVKAVGYAPDKIAIEFTRSLENNPQRTVSRQRQLQAAYKNIPREIMKSGLMAELGSVADSKKVLSDKLYLYFTQMGKDMYEDKTINIDNLPNYDIDHILPQAFIKDDSIDNRVLISKEENARKSNRVPLKFFGAKRMGFWKDLLNNGLISNRKFQNLTTDPEKISKYSAKGFIHRQLVETSQVIRLVANILGNEYSQAGTTIIEVSAKMNRQLREDFHLIKNRNVNDYHHAMDAYLTAYVGDYLYLRYPKLRPYFVYGDFKKAEDQDLNIRNFNFLHDLKDNESLDKIVDSETGEIVWEKHGSVKQLKKVYHYKFMLVSQEVYTRQDALFNQTIYPASDADKRKLIPIKNSKPVDVYGGYSGNIDAYMAIVRVHGKKEDNYKVVGIPMRAVTKLKKAEKEGHDSYLNAVHEVLKPQFTKKKKNRKTGEITETVDEFDVLLGKVYYRQLIVDGNKKFMLGSSSYQYNAKQLVLSDKAMQVLSKNGKVKSQDENQNLIDVYDEILEKVDQYFELYDQRHYRESLHKGRGIFVNLPLSNQYDGSKLTSYGKYETIDAILNGLHANATMSNLRYLGISSPFGKMQASNGLTIDPDSIICYQSPTGLFERQIKLSDL

SEQ ID NO: 96 - protein, 1239 aa, Lactobacillus buchneri
MTEKRKFDIREVYLAIHHIVKYRGNFLNSATVDSFKTSNIDFTSQFDRLNELYRQVILEEPFQINMNQVDKMTNKLLDNDALKLDTQKQVAKLLPVIYNDKPVDKQYTRLATEFSKAILGYKTKLDVILNLDTQNAKDWAIRLDDEDIDDKLPALVENLDESRQEIVTIIRDLYAQITLNAIVPKGKSLSESMVDKYNDHKDHLDLLMGLIHELGDDSAKGIKLREAYTQYVGKSGDKTLNQDDFYAAIKKNLDEDSKRSPKIQRLIEQASFMPKQRTSANGVIPHQLHQLELDRIIENQGRYYPFLKEPNSNTHKPNGGKYKLDELVAFRIPYYVGPLITKQDQEKTSGADFAWMIRKPGQGGEITPWNFDQEVDRMASANTFIRRMTTKDSYLVAEDVLPDSSLIYEKFKVLNELNMLKVNDRRLSISQKQDLFNNLFKKQKTIRTKKLQTYIRTKWELPSVMISGLSDPDKFNSSLATYIDFRDVFGEKVDDPNRQADYEKIIEWSTVFEDRKIYQAKLNQLDWLTESQSKALLTKHYTGWGRLSKKLLTGLKDQNGDSILDQLWKTNDNFMQIQSRDEFAKQIHDENAKQFHEANNVDDILDDAFTSPQNKKAIRQVDKVVQDVVKAVGYAPDKIAIEFTRSPQDRPQRTFSRQRQLQSTYLNVAKALMKSNLNQELKSVIDSQQTLTDKLYLYFTQLGQDMYTGKEINFDELVNYQIDHILPQAFIKDDSLDNRVLVSAPINNAKSDNVPVKKFGAKMGYFWKQLAENHLISKRKLNNLTTDPDKIGKFTAQGFIHRQLVETSQVIRLVANILGNEYGHDGTTIIEVTAKMNHQMRKDFDLIKIRDVNDYHHAMDAYLTAYVGDYLYLRYPKLRSYFVYGDFKKLKDQSLKIRNFNFLHDLTNDEAGDKIVDQETGEIIWDKHESVKQLKKVYHYKFMLVSQEVYTRQDALFNQTIYPASDADKRKLIPIKNNKPVDVYGGYSGNVDAYMAIVRIHGKKEDKYKVVGVPMRAVADLKKAESKGRDNYLNAVHEVLKPQFTKKKKDRKTGEITEMMDDFDVLLGKVYYRQLIVDGNKKFMLGSSTYQYNAKQLVLSDKAMQVLSKDDKLKNQDENQNLIDVYDEILEKVDQYFELYDINKFRQKLHDGRKKFIELPVDNDFNGKKLISYGKRATIISILNGLHANATMSNLKYLGISSPFGMLQVPNGIILSPASRICYQSPTGLFERKVKLSDL

SEQ ID NO: 97 - protein, 1381 aa, Lactobacillus fermentum
MDYVKEYHIGLDIGTSSIGWAVTDSQFKLMRIKGKTAIGVRLFEEGKTAAERRTFRTTRRRLKRRKWRLHYLDKIFAPHLQEVDENFLRRLKQSNIHPEDPAKNQAFIGKLLFPDLLKKNERGYPTLIKMRDELPVEQRAHYPVTNIYKLREAMINEDRQFDLREVYLAVHHIVKYRGHFLNNASVDKFKVGRIDFDKSFNVLNEAYEELQNGEGSFTIEPSKVEKIGQLLLDTKMRKLDRQKAVAKLLEVKVADKEETKRNKQIATAMSKLVLGYKADFATVAMANGNEWKIDLSSETSEDEIEKFREELSDAQNDILTEITSLFSQIMLNAIVPNGMSISESMMDRYWTHERQLAEVKEYLATQPASARKEFDQVYNKYIGQVPKEKGFDLEKGLKKILSKKENWKEIDELLKAGDFLPKQRTSANGVIPHQMHQQELDRIIEKQAKYYPWLATENPATGERDRHQAKYELDQLVSFRIPYYVGPLVTPEVQKATSGAKFAWAKRKEDGEITPWNLWDKIDRAESAEAFIKRMTVKDTYLLNEDVLPANSLLYQKYNVLNELNNVRVNGRRLSVGIKQDIYTELFKKKKTVKAGDVASLVMAKTRGVNKPSVEGLSDPKKFNSNLATYLDLKSIMGDKVDDNRYQMDLENIIEWRSVFEDGEIFADKLTEVEWLTDEQRSALVKKRYKGWGRLSKKLLTGIVDENGQRIIDLMWNTDQNFMQIVNQPVFKEQIDQLNQKAITNDGMTLRERVESVLDDAYTSPQNKKAIWQVVRVVEDIVKAVGNAPKSISIEFARNEGNKGEITRSRRTQLQKLFEDQAHELVKDTSLTEELEKAPDLSDRYYFYFTQGGKDMYTGDPINFDEISTKYDIDHILPQSFVKDDSLDNRVLVSRAENNKKSDRVPAKLYAAKMKPYWNQLLKQGLITQRKFENLTMDVDQNIKYRSLGFVKRQLVETRQVIKLTANILGSMYQEAGTDIIETRAGLTKQLREEFDLPKVREVNDYHHAVDAYLTTFAGQYLNRRYPKLRSFFVYGEYMKFKHGSDLKLRNFNFFHELMEGDKSQGKVVDQQTGELITTRDEVAKSFDRLLNMKYMLVSKEVHDRSDQLYGATIVTAKESGKLTSPIEIKKNRPVDLYGAYTNGTSAFMTIIKFTGNKPKYKVIGVPTTSAVGLKRVGKPGSESYNQELHRIIKSNPKVKKDFEIVVPHVSYSQLIVDGDCKFTLASDTYQHPATQLVLSKESMEIIADDFKFVKENPATADEQLVRVFDEIVNQMNHYFTIFDQRSNRQKVTKARDKFVSLPTESEYEGAKKTQVGKTEVITNLLMGLHANAAQGDLKVLGLSTFGFFQSSGGLNLSEDAMIVYQSPTGLFERRICLKDI

SEQ ID NO: 98 - protein, 1306 aa, Sphingobacterium spiritivorum
MKHILGLDLGTNSIGWALIKQNFENKQGEILGMGSRIIPMGAELSKFEQGQAQTKNANRRIARGTRKLNKRYKQRRNKLIYILQGLGMLPDQIKLVNQFSDPNKLDKISILPISKNQQQLTAFDLLELRVKALTEKIELEELGKVIYKYNQLRGYSGGNSEPEKEENNEDESEENEKTNDSFVVFSKVLSLGLPEEITFKGKKLSKRKIAIETEDGIIEAETFLDSLKENDSLELHVNIRRAKSGDTITIKLPSKTSWRKKMENIEKQLADKSKELGREYFISELLFDILKENKWAKIRNNVILRSRYESEFDAVWSEQSKYYPILNHLETDRLQKILEFIFPGQKESQEKLRQTGLKEGLKYVIKNQVVFYQRELKDQSDLISNCRYEPTEKVVAKSHPVFQEYKIWEQINKLVINTKIENGVNRKGEIRYKYIDKPIPVALKEWLYEELQSKKEVSFNPILTKLKKEFKLRENVDFLNGMNAKDKLKGNETKVILQKALGELWNIFGLDDSERQVELWEILYNGKGNEYDLTSERTSNILAFIEKYSPDLENKNDVAIKISKIKFSRNYSNLSLKAIDNILPLVRAGKFFDQNFSEALSHKIVKLLNENVEDPFEKSAQEFLDKNQDVLSDGGIVNAIATILVYDKHTAKEYSGDELIKEFTQISRLKQGELRNPLAEQIINEALVIVRDIWRKYGFKPDEIRVELARELKNNAVERGKMYSANLKSQKHNAEIRNKLIELKQEISIANIEKYKLWVSQENLQEVYLKNYNDPSKSEIEKLKLWESQGHISPYTGQPISLSELFNRERYDVDHIIPQSRYFDDSLSNKVICEKSINNEKGNRTSMEYFEVGSVNYRIFTKDQFIDHANKYFSGKKRKNLLATSIPEDPIQRQIKDTQYISIRIREELNKIVGNENVKTTTGGITDYLRNHWGLTDKFKVLLKERYEAVLPKIAQLEYDNYKKETEKKFTEYKNADVEFNEPILDEEIFIEKFRSEFIRKKNNKLIIKGWSKRIDHRHHAMDALVIACTQPAHIKRLNDLNQVLKEWLDKNKEKFFPGFSGTKTELLDEVLNLEEEKRREIFNQLEKFRAIEMPWKGFPEEAEQKLKEVIVSHKPKDKLLLQYDIQGNKQIKLRGQLHEGTLYGLSNGKEIYRIPINKLAGKQFATEKTIEKIVNPFLKNVIEEHLKSFGKKEEAFSAEGILDLNKKLAERKDEQQNPKPHPPISTIKIYYKDPSKSKKKKTDDEDDISLQKLNRKKSFNDSLYVKTGDNYLFAVMEKEVFNKKLNKDKTERHYDLKLFLTLLIF

SEQ ID NO: 99 - protein, 1358 aa, Acidaminococcus sp.
MGKMYYLGLDIGTNSVGYAVTDPSYHLLKFKGEPMWGAHVFAAGNQSAERRSFRTSRRRLDRRQQRVKLVQEIFAPVISPIDPRFFIRLHESALWRDDVAETDKHIFFNDPTYTDKEYYSDYPTIHHLIVDLMESSEKHDPRLVYLAVAWLVAHRGHFLNEVDKDNIGDVLSFDAFYPEFLAFLSDNGVSPWVCESKALQATLLSRNSVNDKYKALKSLIFGSQKPEDNFDANISEDGLIQLLAGKKVKVNKLFPQESNDASFTLNDKEDAIEEILGTLTPDECEWIAHIRRLFDWAIMKHALKDGRTISESKVKLYEQHHHDLTQLKYFVKTYLAKEYDDIFRNVDSETTKNYVAYSYHVKEVKGTLPKNKATQEEFCKYVLGKVKNIECSEADKVDFDEMIQRLTDNSFMPKQVSGENRVIPYQLYYYELKTILNKAASYLPFLTQCGKDAISNQDKLLSIMTFRIPYFVGPLRKDNSEHAWLERKAGKIYPWNFNDKVDLDKSEEAFIRRMTNTCTYYPGEDVLPLDSLIYEKFMILNEINNIRIDGYPISVDVKQQVFGLFEKKRRVTVKDIQNLLLSLGALDKHGKLTGIDTTIHSNYNTYHHFKSLMERGVLTRDDVERIVERMTYSDDTKRVRLWLNNNYGTLTADDVKHISRLRKHDFGRLSKMFLTGLKGVHKETGERASILDFMWNTNDNLMQLLSECYTFSDEITKLQEAYYAKAQLSLNDFLDSMYISNAVKRPIYRTLAVVNDIRKACGTAPKRIFIEMARDGESKKKRSVTRREQIKNLYRSIRKDFQQEVDFLEKILENKSDGQLQSDALYLYFAQLGRDMYTGDPIKLEHIKDQSFYNIDHIYPQSMVKDDSLDNKVLVQSEINGEKSSRYPLDAAIRNKMKPLWDAYYNHGLISLKKYQRLTRSTPFTDDEKWDFINRQLVETRQSTKALAILLKRKFPDTEIVYSKAGLSSDFRHEFGLVKSRNINDLHHAKDAFLAIVTGNVYHERFNRRWFMVNQPYSVKTKTLFTHSIKNGNFVAWNGEEDLGRIVKMLKQNKNTIHFTRFSFDRKEGLFDIQPLKASTGLVPRKAGLDVVKYGGYDKSTAAYYLLVRFTLEDKKTQHKLMMIPVEGLYKARIDHDKEFLTDYAQTTISEILQKDKQKVINIMFPMGTRHIKLNSMISIDGFYLSIGGKSSKGKSVLCHAMVPLIVPHKIECYIKAMESFARKFKENNKLRIVEKFDKITVEDNLNLYELFLQKLQHNPYNKFFSTQFDVLTNGRSTFTKLSPEEQVQTLLNILSIFKTCRSSGCDLKSINGSAQAARIMISADLTGLSKKYSDIRLVEQSASGLFVSKSQNLLEYL

SEQ ID NO: 100 - protein, 653 aa, Oribacterium sinus
MELINSEEFTFKEELEKHTQVAMKQLSEFTYEDLEDSYFSVPVKRMIWQTLLVVREIEKVMGYAPKRIFVEMTRTEEEKGDKGRKESRGNQLLELYKSIKNTDSHNWKEEIAAADKDGKLRSKKLFLYYMQMGRDMYTGEEIDLGRLYDDNLYDIDHIYPRHYVKDDSIMNNLVLVNRRANQDIKKDLYPIPEQIKANPNVHMLWDALHKQKLITDEKYARLTSNTAFSEKQLGDFIARQLVETGQGTKGVADLLEQLFKDTVIVYAKASNVSDFRRDNGFLKSRLVNDFHHAQDAYLNIVVGNVYYTKFTKNPWNFICKDYEKDKEKNRYNLARMFDWNVVRGSETAWIVERKDEKGTISTVRKMMQKNTPLLTRMNFEQHGSIANATLYSAKKAKSENYLPLKTADEKMSDVKKYGGYTSMSIAYYFIVHHKEDKKENVTIEALPLYCKDKVEREENGLEKYCEEVLGYGEVNIIRRKLKIQSLLEFNGYQVHLSGKTGNQLILRNAISLCLSTKWITYIKKLEKAVNIQIVEEVVTPEENIKLYNLLADKHANTVYSKRPNAYGEKLLADREIFVTLEFGKQCEALLQILSLTKIGSTEANLLLIGESEHSGKILISKNLKASDRPAVINQSPCGLYEKKEWIFDKIVEK

SEQ ID NO: 101 - protein, 1436 aa, Capnocytophaga gingivalis
MKYIKYILGLDIGSNSIGWALIQLDLLQKTKRIIAAGSRIIPMDQKVLSDFGKGITISPTAQRTSYRNARHCRERHLLRRERLHRVLHILGFLPTHYDKQIDFSKRYGKFVDNTEPKIAYNEGKFLFMDSFQEMLSDFKSHQPDLFYTKKNGEESKIPYDWTIYYLRKKALSQKISKEELAWIILNFNQKRGYYQLREEEGNKENDFEIISSKIISVIKKDKDKKYNKYWYDIILENGLVYQAAFYNDFVYNWINQDREFIIERTSLKNGAEKVKLSYLPTFDEIDKMDKKEQDKYYKKIKIKTENSIGNKTVGCYIYDHILQNPNEKIKGKLVRTIERKYYKEELKAILEKQIALQPELFTDQLLADCIRELYSKNEAQQRNLAARDFVHLLVEDIIFYQRPLRRQKSTLANCSLESRSYIDKDSHTRKEAPLKVCPKSNPYYQEFRVLQWLQNLKIYEIDSDQEVTHQFIKTLEDKQQLFEFLMAQKEIDCEELLKYFLNQTYPNAKEKALKSELKKWKDTYRWNYVYDIGEKSSKKYPMNETRYELKRHLEKVANLPDDFLSSEVEYLLWHLIYSVKDKVAYEKGLKKFAQKHHLDKDSFVESFKKFNPYPSEYGSFSEKAIRKLLPLMRFGAHWDFNHIDKNTQKRIEDLITGVENEEIRTILREKAEKYQLEKETDFQDLPLWLAQYIVYNRHAEASSLEKWTSVNDLETYLNEFKQHSLRNPIVEQVVMETLRVVRDIWQQYGQGQASFFNEIHIELGRELKKTAKEREKLSKQNQKNEDINLSIKEKLKELEKYNTRAYSITHQEKYKLWLEQKHISPYTGQIISPENLFTDNYEIEHIIPQSRFFDDSLSNKVVCESIVNKAPYKDRQLGLEFIKNQGGRIVKELSKENKTIKIFTEEQYRTFIKEHYSNNPEKTKKLLLEEIPEKMVARQMNDTCYISKFISEILSKIVRSDEQDEGVHSKNVILCTGKITSILRQDWGLNDIWDNLILPRFERMNNLLQKEKFTIYSIEKQKKIPVVPINDQFKSFQKKRIDHRHHAMDAIIIACTTREHINYINNQHALEKEKDKKEKQEERDKLREKLCIKKYNNRSEGNYSWIFKKPWDTFTQEVRVALEDIVVSFKQNLRVINKATNYYERWVEENGKYIKKMVKQEGTNWAIRKPLHEETISGKIYLDREKITKNDILTATRKTVDSSFDDKRIKKITDTGIQKILLNYLKYKGSPEIAFSPEGLEELNKNLSIYNDGKPHKPIYKVRIYEKGSGRFALGEKGRKYKKYVQGASNLYFGIYQGAKRSFATIPLNEVIERQKQGLPSVPEYNEKGDLLLFSLSPNDLVYVPIEGEIIENIDFRNLSKEQKERIYNVNDFSSTCYFTPNRIAKAIFPKEVDLQRKGDKLSGSYDTKTASLEGIQIKEVCIKLKVDRLGNISKA

SEQ ID NO: 102 - protein, 1069 aa, Bacillus cereus
MNYDIGLRIGITSCGWSIINKDLERIEDLGVRVFEKAENPDGTASAAPRREARKSRRKHRRKKHRIERIKRLIVQHDLLSKKELDSLYLSPFNIDVWNLQVEALERKLDNREFARVLIHLVQRRGFQTIRKSVEIQEEGKLLENVSENERIMKVNGYKTVGEMFSKHEKFTHHKRNKDGSYTSVVTRSLLLKEIKTIFNSQRILGNVFSTQKLESDYLYIWGSQRPTLTYEQLMSMVGNCIYEKKEKRAPKTSWAFQYFSLLQKINKLKVSDDNTLRKLSKEERDIVIELAFKKKNVSFVDIRKALKLNDNTKFNHLTYSHVVETKKVEKATFIELKGYHLIKKQLKDRNVELTQELQPKDYDAIAAASTFFKNDIEFRDYLRNQYLDSNGKRKSNIANKVFEDKVIAAVFELNFSKVCHLSFKSLYKLIPHLEKGLDYKEAILCAGYNFRDENKRDKKLFLPVIQQETNPVVHRALTQARKVINAIIREYGSPNTIRFVVANDLAKTYKQRKELESTLKKNRAENEKIKTKLLSMGIINPTGMDIVKYKLWYEQSGICLYTGRQMELSSLFKPGYSIVNHIIPYNRSFDDTYHNRVLTLTETKYEKGNKIPFEYFGAEETCWNEYEKRVSTSKKIHDKKREKLLIRNFDIEYENEMISNNVFDTHYIGSYFEKYIDEHLQFKKSTKKQKVFSIHGNMVAHLHSRWGFNKNSREIYLNHAVDAAIVAVLTDQLIRNIADYYRRDNILEQKGSLKFPEPWKSFSIELEARISPQVRDLIKKLNLDSYLDVDILHIKPVFISKKPRRKVNGEAHKSTIRSLIGINEIGKTVTCIKTRLEDIPFDENGDFPMYGKDTDKYTYTAIKERYLEFNKDKEKAFSTPLYKLKRNGEPGNQIKSVKIIDTRNIVNKVNQGKGIAYNSNIIRVDVFSRDQKYYVVPIYLRDFIKGSLPNKIITAAKGFMQWPETDNSYTFLFSIFPNDLIKVVPKEGKFIKAKNENKENINLTEILGYFKGLDSSTGAFTLESHDGSLLARGIGTKNLLLIEKYQVDVLGRYNKVGNEERQDIKIQQN

SEQ ID NO: 103 - protein, 1391 aa, Lactobacillus jensenii
MKEIKDYIIGLDIGTNSCGYVVTDKQNNILKLKGKTAIGARLFKEGEAAADRRAFRTTRRRLARRRWRLSLLEEIFDEEMNKVDPSFFRRLKESDYSPKDRRKQFNSIVFESSEADKAFYEKYPTIYHLRNALMHDNQKHDLREIFLAVHHIVKYRGNFLREDSVKAFKAAKFTLQGEDGIGPVDKLNDLLKEIYIEAAPELATDNLSKIEDIIKDKKLYKQDKLKQIANLLPKAVDSKDKAKLNKDIAKQVANALMGYMFRLDTLFSFTDVDVKDYKLKFSDANIDESLDALTSLLTDAQIEFVLELQSIYNTIVLNEIVPDGMSLSESMVKKYDDHKKDLKLYKEYIDSLSDQKKAKQLEAAYALYVNYRKADLLAAKKLFEKKKIGDKKFVDVISNFEVFGKFVSDNLDDSELANKIKARLDLGEFLPKQRTNQNGVIPYQLHQVELTQILEKQGKYYPFLITPNPVESHRNNAPYEISELVSFRVPYYVGPLIDNQSIKDKQNKNKFAWMVRQKQGQITPWNFEEMVDTTESANQFIKRMTRKDTYLLAEDVLPKSSLIYQKFMILDELNRIKIDGKKLTSKLKHDIFEKLFKKQKSINLDNLKNYLLAEGNIPGLIEGLSDGINFNNSFSTYIDYRNIFGDEIDNPNKQADFEKMIEWSTVFEDRKIFKRKLKEITWLTPEQIKQVSSKRYSGWGRLSKKLLTQITDENGVNILQRLWNEPETLTEVLANPVIKRKISEANSLFVQINKVENILDDAYTSPQNKKAIRQVIRVVDDIIAAAHGKKPSQIAIEFARSSQNKAKVPDTRKKQLDKIYNKISSEILDSSIKNELKNLKSNKYLSKDKLFLYFKQMGRDAYTGDKLSLDQLQNYDIDHIFPRSFIKDDSLDNRVLTQKPINAKKSDYGIPALEFGNKYVPDLGITVKEMWKLWQENGLISKSKLINLCTNPKKIGSKRASGFINRQLVETSQVIKLVAIILQAEFPDTEIIEVKALQNTTLRESFHLYKNRSVNDYHHAIDAYLTTIVGNYLYQVYPKLRPYFVYGQFKKFNQEKNIDILKRLKNFNFLRQLIFNTDDNIYISGTKEIVFNKKDIIHKLETAYGYKYMNISRECYQETSSLFNQTLYAHNSSVKNSLIPKKKGLPTEIYGGYSGNKDSFFVLVKIVKKRTNLYRIVGIPTRELAKLNSSNNYNQALNKIVESKLCLKETESFKILIKRLLYGTLIVDNGQKFRIGSFKEKHNVQQLVLQLKSMKYIKFYIDGGQNYFTDVERKKLEKQDRDKCLLYVFDDIMNVVNKRFTLFDMSKYEKDGDSLREKFNCLDFNDKVSILSDLLKAFHANSDRTSITKLKITNLGRHQAGKNGITLTTNAQIIYQSPTGLFERRIKIKDL

SEQ ID NO: 104 - protein, 1114 aa, Eubacterium rectale
MNYTEKEKLFMKYILALDIGIASVGWAILDKESETVIEAGSNIFPEASAADNQLRRDMRGAKRNNRRLKTRINDFIKLWENNNLSIPQFKSTEIVGLKVRAITEEITLDELYLILYSYLKHRGISYLEDALDDTVSGSSAYANGLKLNAKELETHYPCEIQQERLNTIGKYRGQSQIINENGEVLDLSNVFTIGAYRKEIQRVFEIQKKYHPELTDEFCDGYMLIFNRKRKYYEGPGNEKSRTDYGRFTTKLDANGNYITEDNIFEKLIGKCSVYPDELRAAAASYTAQEYNVLNDLNNLTINGRKLEENEKHEIVERIKSSNTINMRKIISDCMGENIDDFAGARIDKSGKEIFHKFEVYNKMRKALLEIGIDISNYSREELDEIGYIMTINTDKEAMMEAFQKSWIDLSDDVKQCLINMRKTNGALFNKWQSFSLKIMNELIPEMYAQPKEQMTLLTEMGVTKGTQEEFAGLKYIPVDVVSEDIFNPVVRRSVRISFKILNAVLKKYKALDTIVIEMPRDRNSEEQKKRINDSQKLNEKEMEYIEKKLAVTYGIKLSPSDFSSQKQLSLKLKLWNEQDGICLYSGKTIDPNDIINNPQLFEIDHIIPRSISFDDARSNKVLVYRSENQKKGNQTPYYYLTHSHSEWSFEQYKATVMNLSKKKEYAISRKKIQNLLYSEDITKMDVLKGFINRNINDTSYASRLVLNTIQNFFMANEADTKVKVIKGSYTHQMRCNLKLDKNRDESYSHHAVDAMLIGYSELGYEAYHKLQGEFIDFETGEILRKDMWDENMSDEVYADYLYGKKWANIRNEVVKAEKNVKYWHYVMRKSNRGLCNQTIRGTREYDGKQYKINKLDIRTKEGIKVFAKLAFSKKDSDRERLLVYLNDRRTFDDLCKIYEDYSDAANPFVQYEKETGDIIRKYSKKHNGPRIDKLKYKDGEVGACIDISHKYGFEKGSKKVILESLVPYRMDVYYKEENHSYYLVGVKQSDIKFEKGRNVIDEEAYARILVNEKMIQPGQSRADLENLGFKFKLSFYKNDIIEYEKDGKIYTERLVSRTMPKQRNYIETKPIDKAKFEKQNLVGLGKTKFIKKYRYDILGNKYSCSEEKFTSFC

SEQ ID NO: 105 - protein, 1362 aa, Lactobacillus paracasei
MTKLGKPYGIGVDIGSNSIGFAAVDENSHLIRLKGKTVIGARLFEEGKAAAKRRAGRTTRRRLSRNRWRLSFLRDFFESHITPTDPNFFMRQKYSEISPKDKARYKYEKRLFNDRTDAEFYQQYSTMYHLRNRLMTDPSRADVREIYFAIHHILKSRGHFLTPGDAKDFNTNDVALDEIFPALQDAYAQVYPDLGITFDEDKANEFKTILLNEIATSIDTQRALVKLLLAEEDDKDILKQQKQVLTEFAKAVVGLKTKLNLALGTEVDSSEATAWNFSLGQLDDKWAGIESAMTDEGTEILDQIRDLYRARLLNGIVPTGKTLSQAKVDDYTQHHEDLQLFKAYLKQLEDDGTAKAIRQLYDRYIDGDDAAPFLRENFVKALTKDVTAHPNTKSPELLERLAQPDFMLKQRNKANGAIPVQMQQRELDQIIKNQAVYYDWLAAPNPVEKHRKSMPYQLDELLNFRIPYYVGPLVTAKEQKAAQGGVFAWMVRKDPEGNITPYNFDEKVDREASANTFIQRMKTTDTYLIGEDVLPKQSLLYQRYEVLNELNNVRVNNEKLSIEQKQQVIRELFERHNSVTIKQFAENLRAHGDYAHIPEIRGLADEKRFLSSLSTYRQLKSLLPEAIDDPAKQADIENIIAWSTVFEDAAIFKTKLKEISWLGSEAITKLSNIRYRGWGQFSRKFLNGLTLGNGHTIIQELLLSTNNLMQILTDETLQKKMTELNADKLKTANINDAIDNAYTSPSNKKALRQVLRVVDDIKRAADGQDPSWLYVETADGGGTPGKRTRARQHQLQEIYANAAHELIDTAVRGELEDKISDKADFNDRLVLYFMQGGRDIYTGAPLNIDQLSSYDIDHILPQSLIKDNSLDNRVLVHAIINREKNATFASTIYAQKMNATWRQWHEAGLISGRKLRNLQMRPDQIDKYASGFVARQLVETRQIIKLTEQIVAAQYPDTKIIAVKAGLSHQLREELEFPKNRDVNHYHHAFDAFLAARIGTYLLKRFPNLQAFFTYGKFTKADVKKLRGFNFIRDITHAEDKIVAKDTGEVVWDKQRDVDELDRIYNFKRMLITHEVRFETADLFKQTVYGARDSKEAGGSKQLIPKKKGYPVDIYGGYFRENTAYLAVVKVTKKTETIFKVVKIATSQVAALNKARSRSTAEELSVLTELLKPKFSKVGKNGKITDTPFEVVLPRVPREQLFYNAKYGFFMVNSDTMFHNFQEIWVSRSDQKILQQIRKAKIDYPNVDQDLDNLFHNLADQIVKYFDLYSIAGFKEKISQSQNTFNDLAVDDTDQSVGKITVINELLKGAQANGMTGSLKVLKISTPFGFTQDKSGVLTKDSSIIYQSPTGLFERSVRLTDL

SEQ ID NO: 106 - protein, 1056 aa, Actinobacillus minor
MKALNYILGLDLGIASVGWAVVEIDQNELPIRLIDLGVRTFERAEVPKTGDSLALARRLARSSRRLVRRRAVRLLKAKRLLKQEGILQADDFHSSHLKPLPNNPWELRVKGLNHLLDRKEWAAVLLHLLKHRGYLSQRKNESKTDNKELGALLKGVSENRQLLQAQAFSTPAEIAIKKFQQEEGHIRNQRGAYSHTFDRNDLLAELRLLFQKQREFNNPYTSQSLEQAIAELLMWQKPALSGEAILKMLGKCTFEPSEYKAPKNSYSAEYFVWLTKLNNLRILENGADRGLTAEERQLLINQPFEKAKFTYAQARKLLELSDLAIFKGVRYGKDNAESATLMEMKAWHAIRKALESNGLKTEWNGLKTKPELLDKIGTAFSIYKTDEDISQYLNGELSPAVLNALLENLSFDKFIRLSLQSLAKILPLMEQGLRYDEACKQVYGDHYGKKEQLELRFLPKIPVEDIRNPVVLRTLSQARKVINGVVRLYGSPARIHIETGREVGKSFSERRDISKRQEENRNERQRAVEKFKEFFPHFVGEPKAKDILKMRLYEQQHGKCLYSGKELDLNRLLEKGYVEIDHALPFSRTWDDSFNNKVLVLASENQNKGNQTPYEWLNGKENAERWKLFQALVNGSRFPYSKKQRILTKYLDEDGFRERNLNDTRYVARFLCNFIEDNMQLVGQGKKRVFASNGQITALLRRSWGIQKVREDNDRHHAVDAVVVACSTRALQKKITDYVRYKEMNVFTGEKIDQETGEIIKFHFPEPWKFFRQEVEIRVFSETPAEDVVIALPDRPQANHEFIQPLFVSRAPTRKMTGQGHMETIKSAKRLAEGLSVSRVPLTQLKLKDLENMVNREREKALYEALKVRLEKFNNDPAKAFADPFYKKGGQQVKAVRVEQVQKSGVLVRQENGVADNASMVRVDVFIKGGKYFLVPIYTWQVAKGILPNRAATQGKEEEYWDIMDETAIFQFSLYQNDLIKLVTKKKTIFGYFNGLNRATSNINIKEHDLDKSKGKDGIYLEVGVKLALSLEKYQVDELGKNIQPCRSMKKRPPVR

SEQ ID NO: 107 - protein, 1081 aa, Neisseria flavescens
MTAFKPNPINYILGLDIGIASVGWAMVEIDEEENPIRLIDLGVRVFERAEVPKTGDSLAAARRLARSVRRLTRRRAHRLLRARRLLKREGVLQAADFDENGLIKSLPNTPWQLRAAALDRKLTPLEWSAVLLHLIKHRGYLSQRKNEGETADKELGALLKGVADNAHALQTGDFRTPAELAVNKFEKESGHIRNQRGDYSHTFSRKDLQAELVLLFEKQKEFGNPHISDGLKEGIETLLMAQRPALSGDAVQKMLGYCTFEPTEPKAAKNTYTAERFIWLTKLNNLRILEQGSERPLTDTERATLIDMPYKNKLTYAKARELLGLDDTAFFKGLRYGKDNAESATLMEMKAYHAIRRALEKEGLKDKKSPLSLSPELQDEIGTAFSLFKTDEDITGRLKGCLQPEILDALLKHINFDKFVQISLKALRRIVPLMEQGKRYDEACAETYGDHYGEKNSEEMLYLPPIPADEIRNPVVLRALSQARKVINGVVRRYGSPARIHIETAREVGKSFKDRKEIEKRQEENRKDREKAAAKFREYFPNFVGEPKSKDILKLRLYEQQHGKCLYSGKAIDIRRLNGKGYVEIDHALPFSRTWDDSFNNKVLVLGSENQNKGNRTPYEYLNGKDNSREWLEFKARVETSRFPHSKKQRVLLQKFDEKGFKERNLNDTRYVNRFLCQFVADHMQLTGKGKRRVFASNGQITNLLRGFWGLHKVRAENDRHHALDAVVVACSTVAMQQKITCFVRYKEMNAFDGKTVDKETGEVLHQKTHFPQPWEFFAQEVMIRVFGKPDGKPEFEEADTPEKLRALLAEKLSSRPEAVHEYVTPLFVSRAPNRKMSGAHKDTLRSAKRFVKHNEKISVKRVWLTEIKLADLENMVNYKNGREIELYEALKARLGAYGGNAKQAFDPKDNPFYKKGGQLVKAVRVEKTQESGVLLNKKNAYTIADNGDMVRVDVFCKVDKKGKNQYFIVPIYAWQVAENILPDIDCKGYRIDDSYTFCFSLHKYDLIAFQKDEKSKVEFAYYINCDSSNGRFYLAWHDKGSKEQQFRISTQNLVLMQKYQIDELGKEIRPCRLKKRPPVR

SEQ ID NO: 108 - protein, 1392 aa, Gemella haemolysans
MANKTWYLGLDIGSASVGWAATDTGYKIIRKNKKRLWGVRLFEEAKTAEDRRGYRSSRRRLARRKWRLNLLEELFTSEVKKVDENFFLRLKESQYHYEDKTHKVPYAIFNDKDYTDKDYYKDYPTIYHLRSKLMTEENPDIRKVFLAIHHIIKNRGHFLLQGQSFKDGNLNNLIKELLELDILHVGFEVTEEVVDKIADISLEKKTSKDKLNDIKELYPKEKQLLEVFRLIFGGKTSLDKLFAIDEYKELDAAIKSVSFKEKIYEEVRHDYEQVLSNYIELLDLAKLVYDSIILSDIKKEGKTLSESKVELFEKHRDDLLKLKNLVKNDSKLSEDKKVELYALIFKEDKDKGTNYVNYIRKSEEGKGCNYEDFKKFLVKELAKLEESSVKTEIIKDLELEQFLPLQRTKDNSVVPYQIHKEELVKILDNAARYHSFLNEKDESGYNVREKVIQLLEFRIPYYVGPLNSSKKAKEGGFAWSVRNTGYENTPVTPWNYSKVIDESASAEKFITNLTNKCTYLKGEDVLPKSSLLYSEFALLNELNALKYDGNRISLEARNTIIEKLFKQQGKKVTKTSIKNLLKAEGYIDGKGEITGIDITVKNDLKSYRDFKKILGNKFNSEHVENIILWITLYGESRKLIKAKIESVYGEVYSKDEITKMSRLVYKDWGRFSRKLLTELVSKKLYNEETGECLNIIGAMRQNNILFMELLADRFDYSKQIVEFNKELQEDVTEIAPEILDDLYVSPAVKRSIWQTVRIVEELKKIIGCAPAKIFVETTRSNQEKKKPTDSRKKQLELAYKAVKKDVKELEKEIGTINFDVLNDRLSSVEPSKLKAKKLYLYYTQLGRCMYSEEPINISELFDNNKYDIDHIYPQSKIKDDSFTNTVLVKRESNAAKTDRYPLGSDIQTPSNRRFWKFLKEKGLISDEKYNRLVRTEEFSDEELSGFIARQLVETSQSVKAVASILGELNPETSICYSKAENVSSFRQNFGKIKKGDRDSKNNDQLIKVREINDYHHAKDAYLNVVVGNVYDTKFTRNVFNFIKDKKDGRKYSLNKVFYENVSDSKTVAWEMDKTIHQVEKVMNNNNIMVTRRTSEQKGGLFDATVYKAKVAAKAKDGVYYPLKTSNSVVKDVAKYGGYTSIGIAYYSIFEYTIVNKKGEEKITRIIPIPIYISQNIKDSTALIEFGKSQIFCRAYEKIKDFKLLYRKLCIGSKININNYQYYIGGKSDERFYYDSAIQVTLDKKSEKYLKILSKYQNWKKENKDGELWENITKENNIELYNKLVEKMNSEIFTKKKSNKYNELNSEEIRNNFIKISVEEQAKVLLEILNLLTNKKSIFDLKSIDIKAARGKISFNLTSLIQFSIIEQSITGFYEKEITIIGDKGNDMENNNS

SEQ ID NO: 109 - protein, 702 aa, Helicobacter pullorum
MRKILKIDERIQFKEVDYTAKNPENKKFVEFKNLKKFCEILGAIVGDRALADSIARDMTLIKDEEELAQKLRGYGKFSQEQITQLSALHFSHHISLSLKALSEILPFMREGMRYDEACQEAKLQAKHNDKKSKFLPPFCESIYADELTNPVVHRAIAEYRKILNALIAKYGSVHKIHIELTRDVGKNFQEREKYKKEIESNYKARVQAMQECEKLGLTLSEGNILKLRLFREQNEICVYSGRKITLANLKEQGALEIDHILPYSRSSDDSYMNKVLVFTNENQNKGNKTPYEAFGGDSQKWGEIESLALRSGYPKKKAKRILDKGFGDREAGFKSRNIVDSGYIARLIANYTKEYLKFLPLDSHENTALIAGEKDSKIHVEAVKGMLTATMRHFWGLGSKNRYEHTHHAVDAIIIAYINAAMIQRFSQFRQNQESLKARFYAKELAKEEFKTQRAFFEPFSGFREQVLAKVGQIFVSRPPRKRARGALHEETFYSIDDKKLSETYGGKKGVQRALSLGKIRQIGTKIVANGPMVRVDIFKHTQSGRFYAVPIYTMDFALGILPNKAVVSGKDKDRIIKDWLEMDSCYEFCFSLFKDDVIEVQKRDMEKPELAYFVSLDASDGRIKVRHHCNDITKINENQKKLFSEAIEKEVVGRGSIQNLKVFKKYKVSPLGEIKEAKYEPRQPIALKTSPKKHRKQNNAQ

SEQ ID NO: 110 - protein, 1371 aa, Streptococcus dysgalactiae
MDKKYSIGLDIGTNSVGWAVITDDYKVPSKKFKVLGNTDRHSIKKNLIGALLFDSGETAEATRLKRTARRRYTRRKNRIRYLQEIFSSEMSKVDDSFFHRLEESFLVEEDKKHERHPIFGNIVDEVAYHEKYPTIYHLRKKLADSTDKADLRLIYLALAHMIKFRGHFLIEGDLNPDNSDMDKLFIQLVQTYNQLFEENPINASRVDAKAILSARLSKSRRLENLIAQLPGEKRNGLFGNLIALSLGLTPNFKSNFDLAEDAKLQLSKDTYDDDLDNLLAQIGDQYADLFLAAKNLSDAILLSDILRVNSEITKAPLSASMIKRYDEHHQDLTLLKALVRQQLPEKYKEIFFDQSKNGYAGYIDGGASQEEFYKFIKPILEKMDGTEELLAKLNREDLLRKQRTFDNGSIPHQIHLGELHAILRRQEDFYPFLKDNREKIEKILTFRIPYYVGPLARGNSRFAWMTRKSEETITPWNFEEVVDKGASAQSFIERMTNFDKNLPNEKVLPKHSLLYEYFTVYNELTKVKYVTEGMRKPEFLSGKQKEAIVDLLFKTNRKVTVKQLKEDYFKKIECFDSVEISGVEDRFNASLGTYHDLLKIIKDKDFLDNEENEDILEDIVLTLTLFEDKEMIEERLKKYANLFDDKVMKQLKRRHYTGWGRLSRKLINGIRDKQSGKTILDFLKSDGFANRNFMQLINDDSLTFKEAIQKAQVSGQGHSLHEQIANLAGSPAIKKGILQSVKVVDELVKVMGHKPENIVIEMARENQTTQKGQKNSRERMKRIEEGIKELGSQILKEHPVENTQLQNEKLYLYYLQNGRDMYVDQELDINRLSDYDVDHIVPQSFIKDDSIDNKILTRSDKNRGKSDNVPSEEVVKKMKNYWRQLLNAKLITQRKFDNLTKAERGGLSELDKAGFIKRQLVETRQITKHVAQILDSRMNTKYDENDKLIREVKVITLKSKLVSDFRKDFQFYKVREINNYHHAHDAYLNAVVGTALIKKYTKLESEFVYGDYKVYDVRKMIAKSEQEIGKATAKRFFYSNIMNFFKTEITLANGEIRKRPLIETNEETGEIVWDKGRDFATVRKVLSMPQVNIVKKTEVQTGALTNESIYARGSFDKLISRKHRFESSKYGGFGSPTVTYSVLVVAKSKVQDGKVKKIKTGKELIGMTLLDKLVFEKNPLKFIEDKGYGNVQIDKCIKLPKYSLFEFENGTRRMLASVMANNNSRGDLQKANEMFLPAKLVTLLYHAHKIESSKELEHEAYILDHYNDLYQLLSYIERFASLYVDVEKNISKVKELFSNIESYSISEICSSVINLLTLTASGAPADFKFLGTTIPRKRYGSPQSILSSTLIHQSITGLYETRIDLSQLGGD

SEQ ID NO: 111 - protein, 1007 aa, Helicobacter canadensis
MKVLGFDIGINSIGWAFVENNELKDCGVRLFTKAENPKTKESLALPRRNARSSRVRLRRRRSRLLSLKHIISKEFGLHYEDYIALDGNLPKAYTGKIESIYKLRYEALSQAISKEDLARVILHIAKHRGYMNKNQKTSQDSEKGAILSAIKENSNKIKHYQTAGEYFYKELFENLRDGTKEFKNIRNKAMKNEKTGNMESTYYNTILASDLEKELKLILEKQQAYHNYSDTFIKEVLEIAFYQRPLKDFSHLVGSCTFYENEKRACKNSYSAWEFIALGKIINTLESIKKDTGEIFSNEIITQILKEVLDKGSLSYTKLRKMINLDEKVKFKGLKYDKEGVEKTNLIEFKKLKEFKKALGEHNLERKTLDEIATHITLTKDENQLKKQLEQYALSQNQIDALAELDFNDHINLSFKALYEILPLMEKGKRYDEACNELGLKAKTSNQKSEFLPAFCDSIFAQELTNPIVNRAISEYRKVLNRLLKKYGKMHKIHIELARDAGLSKEARNKIEKEQKENKDINDKAEKTCKEFGLKPNAKNILKIKLWREQGEICAYSGKKITIDDLKEDKALEVDHIYPYSRSYDDSYNNKVLVFIKENQLKLNQTPYEAFGSNQEKWSKIQVLAQKLPYKKKNRILDENFKNKDQIEFISRNLNDTRYATSLIAKYTKEYLEFLPLSDDEDISLKSGEKGSKTHVQTMNGMLTSVLRHAWGFSQKDRNNHLHHALDAIIIAYSTNSIIKAFSDFKKNQEILKAKLYAKKLTSEEYKNQSKFTGFEKYRSKILEKLDSIFVSKPPNKNTKGALHEQTFYSYQDILEEYKTQEGLKRALECGKVRKIGTKYVVNDRMVRLDIFKKDNKFYGIPIYTMDFALGVLPNKVVTIGTDKDKIKKEWKTIDETYEFCFSLYKGDLVLIQKKEMQESEFAYYNGFDISSASISLEKHDNKFENLTENQKLLFPKAKEGDVEVRGIGIQGLKVFKKYMVTPLGEIQETRTEARQNIQPRKKHGLR

SEQ ID NO: 112 - protein, 1397 aa, gamma proteobacterium
MTKNYISPIAIDLGAKFTGVALYQYLEGADCTQEVAKGLLVDDRGNVTWSQEGRRGKRHQVRGYKRRKMAKRLLWLILDSEYGIKREEVTEPLLKFINGLLNRRGYTYISEEVDEESMNVSPLPFSEMMPDYFNSSAPLLEQLAKLLSDKNKLVRFRAEGKIPSNKNEFKKLLDTALDGKYKDEKKELSEAWGNILIASENVLKSTVDGHKSRSEYLANIKEDIKSNEELEKQISSKEIDGFYNLVGHLSNFQLRLLRKYFNDPNMSGVSYWDEKRLEKYFYQWVQGWHTKGGTDEAEKKNIILKTKGAPLLKTLKSLSADLTIPPYEDQNNRRPPKCQSVLLSDEKLTMHYPKWKEWVGQLVKQNDNAYLNENVTLANALHRIVERSRSIDPYQLRLLISITDAEKRNDLAGYKRLKLSLGSEVDEFLLLVKNIVDETKEAREGLWFETENKLFFKCGKTPPRKEKLKSTLLSAVLGKNLSDDEQSSFIEEFWKSGTPKIERRNVRGWCRLASQVQKTYGVYLKEYGLQQLHKLEAGKKLDDKPLALLYKNSGLIASKIGEALNIEPDEVSRFASPHSLAQIFNIIEGDVAGFNKTCRACTYENIWRMQEEKVESLLTNQLLSEIHGERKVPLKSAMCTRLSADSTRPFDGQMASIIEHIARKIAQHKIAQINDVPKEFSIDIPIIIESNQFSFTAELEEIKRGRGSAKAKKAKELGEKSKAGWVSKTERIKTSSEGICPYTGAPLGGSGEIDHIIPRSLTGRTKKTVFNSEANLIYCSSKGNHDKGNRVYVIEQLNDKYLKKQFSTSDVNLIKKKIKTTIQRFTEGGEKLRSFSELSREDQKAFRHALFVPELKSEVTSLLAVKNITRVNGTQAWLAKKIASLLAEHLDKQGRDYTLSAHQIDPWSVSKQRKMLASAEPIWAKKDPQPAASHVVDAVCTFLEALEQPHTASRLKTISSTSFEKTGWRSALIPDLIKVDALDRRPKYRRYNIGSTSLFKDGIYAERFLPILIDENGLMAGYDIDNSLKAKGADVVFESLSPFLLFKGEEVGAQSLSDWQERIDGRYLYMSIDKVKAFDYLQEKVGEKDIAAELLNSIHFTQRKTELRAKFSDDSGKKMKTLDAIRKSLKLTVTVNEIGKRKEKCGFSGTIGIPAKSAWENLLDEPLLETYWGTKMPPQEIWEKVYRKHFPRNIPNQAHRKVRKDFSLPVVDSVSGGFRVKRKTPNGYNYQLLAIDGYSAVGFKKEGDNVDFKSPALVPQIAESKSVTPISSELVHLDKNEIVYFDEWRKIDISDSDLKQFVSSLELAPGSQNRFYIRFTVDEDQFERHFKSALRVNGIQDLDTVNKTFDWNREIPSLLIPPRSNLFLLETGQKITFEYIANGANAEVKKAYSLRRA

SEQ ID NO: 113 - protein, 1082 aa, Neisseria meningitidis
MAAFKPNPINYILGLDIGIASVGWAMVEIDEEENPIRLIDLGVRVFERAEVPKTGDSLAMVRRLARSVRRLTRRRAHRLLRARRLLKREGVLQAADFDENGLIKSLPNTPWQLRAAALDRKLTPLEWSAVLLHLIKHRGYLSQRKNEGETADKELGALLKGVADNAHALQTGDFRTPAELALNKFEKESGHIRNQRGDYSHTFSRKDLQAELILLFEKQKEFGNPHISGGLKEGIETLLMTQRPALSGDAVQKMLGHCTFEPAEPKAAKNTYTAERFIWLTKLNNLRILEQGSERPLTDTERATLMDEPYRKSKLTYAQARKLLGLEDTAFFKGLRYGKDNAEASTLMEMKAYHAISRALEKEGLKDKKSPLNLSPELQDEIGTAFSLFKTDEDITGRLKDRIQPEILEALLKHISFDKFVQISLKALRRIVPLMEQGKRYDEACAEIYGDHYGKKNTEEKIYLPPIPADEIRNPVVLRALSQARKVINGVVRRYGSPARIHIETAREVGKSFKDRKEIEKRQEENRKDREKAAAKFREYFPNFVGEPKSKDILKLRLYEQQHGKCLYSGKEINLGRLNEKGYVEIDHALPFSRTWDDSFNNKVLVLGSENQNKGNQTPYEYFNGKDNSREWQEFKARVETSRFPRSKKQRILLQKFDEDGFKERNLNDTRYVNRFLCQFVADRMRLTGKGKKRVFASNGQITNLLRGFWGLRKVRAENDRHHALDAVVVACSTVAMQQKITRFVRYKEMNAFDGKTIDKETGEVLHQKTHFPQPWEFFAQEVMIRVFGKPDGKPEFEEADTPEKLRTLLAEKLSSRPEAVHEYVTPLFVSRAPNRKMSGQGHMETVKSAKRLDEGVSVLRVPLTQLKLKDLEKMVNREREPKLYEALKARLEAHKDDPAKAFAEPFYKYDKAGNRTQQVKAVRVEQVQKTGVWVRNHNGIADNATMVRVDVFEKGDKYYLVPIYSWQVAKGILPDRAVVQGKDEEDWQLIDDSFNFKFSLHPNDLVEVITKKARMFGYFASCHRGTGNINIRIHDLDHKIGKNGILEGIGVKTALSFQKYQIDELGKEIRPCRLKKRPPVR

SEQ ID NO: 114 - protein, 1334 aa, Listeria monocytogenes
MKKPYTIGLDIGTNSVGWAVLTDQYDLVKRKMKISGDSEKKQIKKNFWGVRLFEKGETAAKRRMSRTARRRIERRRNRISYLQEIFAIQMNEVDDNFFNRLKESFYAESDKKYNRHPFFGTVEEEVAYYKDFPTIYHLRKELIDSQKKADLRLVYLALAHIIKYRGHFLIEGALDTKNTSIDEMFKQFLQIYNQVFANDIEEASLKKTEKNQEVAQILAEKFTRKDKLDKILSLYPGEKTTGVFAQFVNIIVGSTGKFKKHFNLHEKKDINCAEDTYDTDLESLLAIIGDEFAEVFVAAKNAYNAVVLSNIITVTDSTTRAKLSASLIERFENHKEDLKKMKRFVRTYLPEKYDEIFDDTEKHGYAGYISGKTKQADFYKYMKATLEKIEGADYFIAKIEEENFLRKQRTFDNGVIPHQLHLEELEAILHQQAKYYPFLREDYEKIKSLVTFRIPYFVGPLAKGQSEFAWLTRKADGEIRPWNIEEKVDFGKSAVDFIEKMTNKDTYLPKENVLPKHSLCYQKYMVYNELTKVRYIDDQGKTNYFSGQEKQQIFNDLFKQKRKVKKKDLELFLRNINQIESPTIEGLEDSFNASYATYHDLLKVGMKQEILDNPLNTEMLEDIVKILTVFEDKRMIKEQLQQFSDVLDGTVLKKLERRHYTGWGRLSAKLLVGIRDKQSHLTILDYLMNDDGLNRNLMQLINDSNLSFKSIIEKEQVSTTDKDLQSIVAELAGSPAIKKGILQSLKIVDELVSVMGYPPQTIVVEMARENQTTNKGKNNSKPRYKSLEKAIKEFGSQILKEHPTDNQELKNNRLYLYYLQNGKDMYTGQELDIHNLSNYDIDHIVPQSFITDNSVDNLVLTSSAGNREKGDNVPPLEIVQKRKIFWEKLYQGNLMSKRKFDYLTKAERGGLTEADKARFIHRQLVETRQITKNVANILHQRFNYKTDGNKDTMETVRIVTLKSALVSQFRKQFQFYKVREVNDYHHAHDAYLNGVVANTLLKVYPQLEPEFVYGEYHQFGWFKANKATAKKQFYTNIMLFFAQKDRIIDENGEILWDKRYLETVKKVLGYRQMNIVKKTEIQKGEFSNVTPNPKGKSNKLIPRKKDWDPIKYGGFDGSKMAYAIIIEYEKQKRKVRIEKKLIQINIMEREAFEKDEKTFLEEKGYHQPKVLIKVPKYTLYECKNGRRRMLGSANEAHKGNQMLLPNHLMALLYHAEKYEAIDGESLAYIEVHRALFDELLAYISEFARKYTLSNDRLDEINMLYERNKDGDVKSIAESFVSLKKFNAFGVHQDFSFFGTKIERKRDRKLNELLNSTIIYQSITGLYESRKRLDN

SEQ ID NO: 115 - protein, 1337 aa, Enterococcus faecalis
MKKDYVIGLDIGTNSVGWAVMTEDYQLVKKKMPIYGNTEKKKIKKNFWGVRLFEEGHTAEDRRLKRTARRRISRRRNRLRYLQAFFEEAMTALDENFFARLQESFLVPEDKKWHRHPIFAKLEDEVAYHETYPTIYHLRKKLADSSEQADLRLIYLALAHIVKYRGHFLIEGKLSTENISVKEQFQQFMIIYNQTFVNGESRLVSAPLPESVLIEEELTEKASRTKKSEKVLQQFPQEKANGLFGQFLKLMVGNKADFKKVFGLEEEAKITYASESYEEDLEGILAKVGDEYSDVFLAAKNVYDAVELSTILADSDKKSHAKLSSSMIVRFTEHQEDLKKFKRFIRENCPDEYDNLFKNEQKDGYAGYIAHAGKVSQLKFYQYVKKIIQDIAGAEYFLEKIAQENFLRKQRTFDNGVIPHQIHLAELQAIIHRQAAYYPFLKENQEKIEQLVTFRIPYYIGPLSKGDASTFAWLKRQSEEPIRPWNLQETVDLDQSATAFIERMTNFDTYLSSEKVLPKHSLLYEKFMVFNELTKISYTDDRGIKANFSGKEKEKIFDYLFKTRRKVKKKDIIQFYRNEYNTEIVTLSGLEEDQFNASFSTYQDLLKCGLTRAELDHPDNAEKLEDIIKILTIFEDRQRIRTQLSTFKGQFSAEVLKKLERKHYTGWGRLSKKLINGIYDKESGKTILGYLIKDDGVSKHYNRNFMQLINDSQLSFKNAIQKAQSSEHEETLSETVNELAGSPAIKKGIYQSLKIVDELVAIMGYAPKRIVVEMARENQTTSTGKRRSIQRLKIVEKAMAEIGSNLLKEQPTTNEQLRDTRLFLYYMQNGKDMYTGDELSLHRLSHYDIDHIIPQSFMKDDSLDNLVLVGSTENRGKSDDVPSKEVVKDMKAYWEKLYAAGLISQRKFQRLTKGEQGGLTLEDKAHFIQRQLVETRQITKNVAGILDQRYNANSKEKKVQIITLKASLTSQFRSIFGLYKVREVNDYHHGQDAYLNCVVATTLLKVYPNLAPEFVYGEYPKFQAFKENKATAKAIIYTNLLRFFTEDEPRFTKDGEILWSNSYLKTIKKELNYHQMNIVKKVEVQKGGFSKESIKPKGPSNKLIPVKNGLDPQKYGGFDSPVVAYTVLFTHEKGKKPLIKQEILGITIMEKTRFEQNPILFLEEKGFLRPRVLMKLPKYTLYEFPEGRRRLLASAKEAQKGNQMVLPEHLLTLLYHAKQCLLPNQSESLAYVEQHQPEFQEILERVVDFAEVHTLAKSKVQQIVKLFEANQTADVKEIAASFIQLMQFNAMGAPSTFKFFQKDIERARYTSIKEIFDATIIYQSTTGLYETRRKVVD

SEQ ID NO: 116 - protein, 1426 aa, Capnocytophaga ochracea
MKNILGLDLGTTSIGFAHIVEDENKEKSEIKELGVRIVSLTTDEQSDFEKGKSITTNANRTLKHGARLNLDRYQQRRKYLIDLLQKANLITPSSILAENGKNTTHSTWQLRAKAVTERIEKEEFARILLAINKKRGYKSSRKAKTEDEGQAIDGMAIAKRLYDENLTPGQLSLQLLQQNKKLLPDFYRSDLQKEFDLVWNFQKQFYPDILTDIFYKELQGKGKDATSKAFSKRYHFDTTENKGSKESVRLQAYQWRAEAISKQLSKEEVAYVLTEINNNLNNASGYLGAISDRSKELYFNRQTVGQYLYAKLQENRHNSLKNKVFYRQDYLDEFERIWETQASFHKELTDELKKQIRDVVIFYQRKPKSQKGLISFCEFESKEIEIEKDGKTITKNIGARVVPKSSPLFQEFKIWQILNNVICKRKGIRKKKISAKTTQLDLLNESSQTIFSLDMECKQLLFDELNLKGDLKSDKVLKLLGYSPQEWEINYNQLEGNRTQKALYEAYLKIVEMEAHDVKDILQIKSAKDDWSLDESPLSASEIREKVKAIFQTLGICTKILYFDPLLPVKEFEEQDSYQLWHLLYSYESDDSTSGNETLYRILEKKYAFKREHARILANVALQDDYGSLSTKAIRKIYPNIKENQYSTACEKAGYKHSKLSLTTEELEARELKNIIPLLKKNALRNPVVEKILNQMINVVNALIEKNSERDAEGKITKYFHFDEIRIELARELKKNAQKRYEMTQNINKAKLEHQKISEILQKEFGIKNPTKSDIIRYRLYQELEHNGYKELYTNAPIARDMLFSKNIEIEHIVPKARVFDDSFSNKTLTFHRINSDKGEYTAFDYITSLNSEEELNQYLTRVENAYKTKSISPTKYKNLLKKASEIGDDFINRDLRDTQYIAKKAKEILFQVTKNVLSTSGSITDRLREDWGLVDVMKELNMPKYQSLGLTEVEERKDGNKVTVIKNWTKRNDHRHHAMDALTVAFTKPSYIQYLNHLNARKDENNKNYSVILAIEEKETIKVPTNNGKNKRVFIEPIPNFRQVAKKHLEEIFISHKAKNKVVTKNTNKPAGTDKQQITLTPRGQLHKETIYGKYQYYINKEEKIGVKFDERTIAKVSNPVYREALLKRLQANDNDPKKAFAGKNALSKNPIYLDESKTKTLPEKVNLTYLEEDFSIRKDISPDNFKDLKSIEKVIDQGVKRILIKRLQAYDNDPKKAFVDLEKNPIWLNKEKGIAIKRVTISGVNNAQPLHIGKDHLGKTTLNKEGKEIPVDYVSTGNNHHVAIYRDKEGNLQEQIVSFFDAVVRAQQGIPIIDKTYKQAEGWQFLFTMKQNEMFVFPNATTGFNPAEIDLLDPKNKKLISPNLFRVQKIATKDYFFRHHLETNVETDNILKNVTWKREGLSGLKDIVKVRINHLGDIVSIGEY

SEQ ID NO: 117 - protein, 1424 aa, Parabacteroides sp.
MKRILGLDLGTNSIGWALVNEAETDEEVSSIIRLGVRVNPLTVDETQNFEKGKSITTNAERTLKRSMRRNLQRYKLRRDALVEFLKELGFITDETILSEQGNRTTFETCRLRAKAAEEEISLEELSRVLLMINKKRGYKSSRKVKKEEDGVLIDGMEIAKKLYEEDLTPGQLCSQLLESGKKVLPDFYRSDLQEELDRIWSVQKQFHPDVFCDAAKEEIKGKNRSQTWAILANYFVWKEEVVGWNDREAKNETIEKECKLVGLKRTTKGYELKKENYRWRAQALTEQLGLEEIAVVLQEINGQINASSGYLGAISDRSKVLYFNHQTVGQYQMAELDKNPHASLRNMVFYRQDYLDEFDRIWEKQAEFHKELTAELKKEIRDMIIFYQRRLKSQKGLISFCEFERLEIVVEKDGKKQTKVIGCKVIPRSHPLFQEFKVWQTLNDIKVLGREKKRNALSASESRALYPEEKEILARELAIKENMKKADVLKLLFENPQELDLNFKQIDGNRTGFSLFSAYSKMIEKYGYEPLDFKKPADEIIGQLRTIFTDLGWNTNLFTIDLTKEGKELEMQPYFRLWHLLYSFEGDNTSTGNGKLIEKIMQLCGVEKEYAVELASLSFQDDYGSLSAKAIKRILPYLKEGNLYDVACEYAGYRHSKSSLTKEEIENKVLKGKLEVLPKNSLRNPVVEKILSQMVNVINTIIDTYGKPDEIRVELARELKKSAKEREELTKAIAKSTREHEEIRKLLQDEFGMMNVSRNDIIRYKLYEELKDNGYKTLYSNQYIPKEKIFSKEIDIEHIIPQSRLFDDSLSNKTLEYKAINIEKGNKTAYDFVKEKYGEEGLQQYINRCESLFNDKKAKLRKLKMEQKDIPDGFIDRDLRNTQYIAKKALAMLNEICRRVVATTGSITDQLREDWQLVDVMKELNLPKYEALGFVETYEDKDGRKIKRIKDWTKRNDHRHHAMDALTVAFTKDAFIQYFNNKNAAQDSGNRNHTNIIGIKTRYFDKGRALPPIPLEQFRIEAKQHLEKLLVSIKAKNKVVTVNVNRTKKRKGENTKIQQTPRGQLHLETVYGSHKQYVTKIEKVNASFDAAKIATVSKRAYRNALLKRLETFGNDPKKAFTGKNALEKNPLYADKYQTIRVPEKVQTVEFETIYTIRKPVDPALNVDKVVDVKVRAILERRLKEYGGDPKKAFVNFWENPIWLNKEKGISIKRVSIRGINNAQSIHVKKDKNGNPIWDENGKQIPVDFVNTGNNHHVAIYRKPVLDKKGQVTFDEDGNLMYELDEVVVPFFEAVTRANLGLPIIDKDYRKSEGWQFLFSMKQNEYFVFPNEKTGFNPKEVDLLNPDNYAMISPNLFRVQTMSKVMYGNNVVRDYKFRHHLETTVKDMKELKDIAYKQYKTLSFGNSVVKIRINHIGQIVSVGEY

SEQ ID NO: 118 - protein, 1395 aa, Lactobacillus jensenii
MKEIKDYIIGLDIGTNSCGYVVTDKQNNILKLKGKTAIGARLFKEGQAAADRRSFRTTRRRLARRHWRLGLLEEIFDPEMEKIDPNFFRRLKESDYSPKDSRKQFNAIVFKSIKADKRFYKKYPTIYHLRNALMHDNQKHDLREIFMAVHHIVKYRGNFLREDSVNAFKAAKFSLRGEDGIGPVDKLNDLLKEIYSEYSPELATNNLSKIEDIIKDKNLYKQDKLKQVATLLIKEADSKDKAKLNKDIAKQVANSFMGYMFRLDTLFSLTDVDVKDYKLKFSDANIDESLDDLTSLLTDAQIEFVLELQSIYNTIVLNEIVPDGMSLSESMIKKYDDHKEDLKIFKEYIDSLSDQKKAKKLLSAYNLYVNYRKSDLVEAKNLFKNKKVGDKNFADVISNFEVFGKFVSDNLDDSELANKIKARLDLGEFLPKQRTNQNGVIPYQLHQVELTQILEKQGKYYPFLITPNPVESHRNNAPYEISELVSFRVPYYVGPLIDNQSIKDKQNKNKFAWMVRQKQGQITPWNLEEMVDTTESANQFIKRMTRKDTYLLAEDVLPKSSLVYQKFMILDELNRIKIDGKKLTSELKHDIFEKLFKKQKSINLDNLKNYLLVEGNIPGLIEGLSDGINFNNSFSTYIDYRNIFGDEIDNPNKQADFEKMIEWSTVFEDRKIFKRKLKEITWLTSEQIKQVSSKRYSGWGRLSKKLLTQITDENGVNILQRLWNEPETLTEVLANPVIKRKIVEANSSFTKAKDMKDILVEAYTSPQNKKAIRQVMRVVDDIIAAAHGKKPSQIAIEFAREDQDNPQMTKSRKAQLDQIYAKISDEFLDDAVKNELKNMKDNKPLAKDKVFLYFKQMGRDAYSGEKLSLDNLQDYDIDHIYPQSFIKDDSFDNRVLVQRAYNNGKSDNVPVLLFGNKIAAGLGITIRQMWKKWLELGLISKRKFNNLITDPEKISRNMASGFVNRQLVETSQVIKLVANILQAKLPDTEIIEVKASYNSILRKEFNLYKSREVNDYHHAIDAYLTTIVGNYLYQVYPKLRPYFVYGQFKKFGKAENQEDDPVKKIKKFNFIYQLIWGKDDAICISHTNQQVFSKKDIIDKLTTAYNFKYMNISHAVYTRNNNMFKQTLFPIIERTTAKTKSLIPKKLDRPTDIYGGYSNNNDAYLALVKVDKKRGSEYRVVGIPMRAAAMLKASKNYDEDLRKVIEPMVMFDKNGKAKRGIEGFRVLVGKMPFKQAVLDGNKKFMLTGTVDTPNLKQLVLSQQNMKYILDYIEDVDCRKHKFGDKVQNPDKCLLEVFDEIIEIVDKYFELFDSRDFREKLRNSRNKFIKLEASKKADTILAILKGLQAKSTRATIKELNISDFGRIITSSISPEAQLIYQSPTGLFERRVKVKDL

SEQ ID NO: 119 - protein, 1140 aa, Roseburia intestinalis
MRENGSDERRRNMDEKMDYRIGLDIGIASVGWAVLQNNSDDEPVRIVDLGVRIFDTAEIPKTGESLAGPRRAARTTRRRLRRRKHRLDRIKWLFENQGLINIDDFLKRYNMAGLPDVYQLRYEALDRKLTDEELAQVLLHIAKHRGFRSTRKAETAAKENGAVLKATDENQKRMQEKGYRTVGEMIYLDEAFRTGCSWSEKGYILTPRNKAENYQHTMLRAMLVEEVKEIFSSQRRLGNEKATEELEEKYLEIMTSQRSFDLGPGMQPDGKPSPYAMEGFSDRVGKCTFLGDQGELRGAKGTYTAEYFVALQKINHTKLVNQDGETRNFTEEERRALTLLLFTQKEVKYAAVRKKLGLPEDILFYNLNYKKAATKEEQQKENQNTEKAKFIGMPYYHDYKKCLEERVKYLTENEVRDLFDEIGMILTCYKNDDSRTERLAKLGLVPIEMEGLLAYTPTKFQHLSMKAMRNIIPFLEKGMTYDKACEEAGYDFKADSKGTKQKLLTGENVNQTINEITNPVVKRSVSQTVKVINAIIRTYGSPQAINIELAREMSKTFEERRKIKGDMEKRQKNNEDVKKQIQELGKLSPTGQDILKYRLWQEQQGICMYSGKTIPLEELFKPGYDIDHILPYSITFDDSFRNKVLVTSQENRQKGNRTPYEYMGNDEQRWNEFETRVKTTIRDYKKQQKLLKKHFSEEERSEFKERNLTDTKYITTVIYNMIRQNLEMAPLNRPEKKKQVRAVNGAITAYLRKRWGLPQKNRETDTHHAMDAVVIACCTDGMIQKISRYTKVRERCYSKGTEFVDAETGEIFRPEDYSRAEWDEIFGVHIPKPWETFRAELDVRMGDDPKGFLDTHSDVALELDYPEYIYENLRPIFVSRMPNHKVTGAAHADTIRSPRHFKDEGIVLTKTALTDLKLDKDGEIDGYYNPQSDLLLYEALKKQLLLYGNDAKKAFAQDFHKPKADGTEGPVVRKVKIQKKQTMGVFVDSGNGIAENGGMVRIDVFRVNGKYYFVPVYTADVVKKVLPNRASTAHKPYGEWKVMEDKDFLFSLYSRDLIHIKSKKDIPIKMVNGGMEGIKETYAYYIGADISAANIQGIAHDSRYKFRGLGIQSLDVLEKCQIDVLGHVSVVRSEKRMGFS

SEQ ID NO: 120 - protein, 992 aa, Treponema vincentii
MQKNSGEDENCGFEFLTEEEKELIKPLFFRISKPSFQFADIEKKLKGKNGFWKFNYRKDTNVSGCPVSAGLKNIFGDEASAESWKDKKVGQYDMCDIWHVLFDFDDEEKLLEFAKRKLFLSDEAAKKFCAIRIQQGYANLSLKAIRKITPFLRKGYIYSTAVFLANIPFMIGRDIFLQNEKEIEDSVKNIIGTLRDKNNIIVLANRCIESAFKDKDNDFRFEEWDKALVENSAWDLFGKKKWNEYDEEKRKTIISQVSEKVEDNLKIAVGKNPNDYKYPLLRTDDLIMDYLNQKGFVVKGELYHPSDTDYNFETPVPAEDGKIYLASPRSPSVKNPVVMRALHQLRKLVNYLIKTGKIDSTTKINVELANDVNDKNQRKAIEELAKTNEKNNADARKKIEELCNEAGFKVVPTESDIKKFRLWKEQNETCPYTGKHISFTDLFGPIPKFDFEHTIPRSLSYDDSLENLTLCDSEFNRNIKKQRLPSELPDFEEINKRFLKFYEDKIDNCLRIIELNSKSGGSYEEPAVKDLRIVKKHKAQYELNYYKEKLRRFSSTEITSGFKHSQLNDTRIITKFSLSYLKGVFDHVQPVKGSMTDTFKRQWGLMERNEIKDRSNHTHHTVDALTVACINRGKFNLLSEAIKNSSDGKHLKFPKPWETFDTDVLNAVRYIIPKYFSDESSLRQSKKILRGRDGKPVLKNGKAVFIQGATARGSLHKDTFYGCIKTVPEKGGKSEMIFVQRIPVSTLDEKVAEKIIDKRIRKTFEKNLSTGIQTLQEIQTDGILLPFKKEGRDVFVKRVRIKAHPTSPIILKKHHNVINKNPKDYKQNYYVENEENYLLAIYRGKDAKGKDVSDHKLCNLLNAVKSRQNKTGFYPDFKEKKGINLQLYKVLKIGKIVILQNDIQEDVFALPKEKLWKRMYRIAGLATSRNDIQIKLVHIIRETPWGYMKGEKDLNAGKECLLYGTANFKGLVEGQDFTVSPAGEIIQKARVC

SEQ ID NO: 121 - protein, 1340 aa, Enterococcus faecium
MKKEYTIGLDIGTNSVGWSVLTDDYRLVSKKMKVAGNTEKSSTKKNFWGVRLFDEGQTAEARRSKRTARRRLARRRQRILELQKIFAPEILKIDEHFFARLNESFLVPDEKKQSRHPVFATIKQEKSYHQTYPTIYHLRQALADSSEKADIRLVYLAMAHLLKYRGHFLIEGELNTENSSVTETFRQFLSTYNQQFSEAGDKQTEKLDEAVDCSFVFTEKMSKTKKAETLLKYFPHEKSNGYLSQFIKLMVGNQGNFKNVFGLEEEAKLQFSKETYEEDLEELLEKIGDDYIDLFVQAKNVYDAVLLSEILSDSTKNTRAKLSAGMIRRYDAHKEDLVLLKRFVKENLPKKYRAFFGDNSVNGYAGYIEGHATQEAFYKFVKKELTGIRGSEVFLTKIEQENFLRKQRTFDNGVIPHQIHLSELRAIIANQKKHYPFLKEEQEKLESLLTFKIPYYVGPLAKKQENSPFAWLIRKSEEKIKPWNLPEIVDMEGSAVRFIERMINTDMYMPHNKVLPKNSLLYQKFSIYNELTKVRYQDERGQMNYFSSIEKKEIFHELFEKNRKVTKKDLQEFLYLKYDIKHAELSGIEKAFNASYTTYHDFLTMSENKREMKQWLEDPELASMFEEIIKTLTVFEDREMIKTRLSHHEATLGKHIIKKLTKKHYTGWGRLSKELIQGIRDKQSNKTILDYLINDDDFPHHRNRNFMQLINDDSLSFKKEIKKAQMITDTENLEEIVKELTGSPAIKKGILQSLKIVDEIVGIMGYEPANIVVEMARENQTTGRGLKSSRPRLKALEESLKDFGSQLLKEYPTDNSSLQKDRLYLYYLQNGRDMYTGAPLDIHRLSDYDIDHIIPRSFTTDNSIDNKVLVSSKENRLKKDDVPSEKVVKKMRSFWYDLYSSKLISKRKLDNLTKIKLTEEDKAGFIKRQLVETRQITKHVAGILHHRFNKAEDTNDPIRKVRIITLKSALVSQFRNRFGIYKVREINEYHHAHDAYLNGVVALALLKKYPQLAPEFVYGEYLKFNAHKANKATVKKEFYSNIMKFFESDTPVCDENGEIFWDKSKSIAQVKKVINHHHMNIVKKTEIQKGGFSKETVEPKKDSSKLLPRKNNWDPAKYGGLGSPNVAYTVAFTYEKGKARKRTNALEGITIMEREAFEQSPVLFLKNKGYEQAEIEMKLPKYALFELENGRKRMVASNKEAQKANSFLLPEHLVTLLYHAKQYDEISHKESFDYVNEHHKEFSEVFARVLEFAGKYTLAEKNIEKLEKIYKENQTDDLAKLASSFVNLMQFNAMGAPADFKFFDVTIPRKRYTSLTEIWQSTIIHQSITGLYETRIRMGK

SEQ ID NO: 122 - protein, 1363 aa, Lactobacillus rhamnosus
MTKLNQPYGIGLDIGSNSIGFAVVDANSHLLRLKGETAIGARLFREGQSAADRRGSRTTRRRLSRTRWRLSFLRDFFAPHITKIDPDFFLRQKYSEISPKDKDRFKYEKRLFNDRTDAEFYEDYPSMYHLRLHLMTHTHKADPREIFLAIHHILKSRGHFLTPGAAKDFNTDKVDLEDIFPALTEAYAQVYPDLELTFDLAKADDFKAKLLDEQATPSDTQKALVNLLLSSDGEKEIVKKRKQVLTEFAKAITGLKTKFNLALGTEVDEADASNWQFSMGQLDDKWSNIETSMTDQGTEIFEQIQELYRARLLNGIVPAGMSLSQAKVADYGQHKEDLELFKTYLKKLNDHELAKTIRGLYDRYINGDDAKPFLREDFVKALTKEVTAHPNEVSEQLLNRMGQANFMLKQRTKANGAIPIQLQQRELDQIIANQSKYYDWLAAPNPVEAHRWKMPYQLDELLNFHIPYYVGPLITPKQQAESGENVFAWMVRKDPSGNITPYNFDEKVDREASANTFIQRMKTTDTYLIGEDVLPKQSLLYQKYEVLNELNNVRINNECLGTDQKQRLIREVFERHSSVTIKQVADNLVAHGDFARRPEIRGLADEKRFLSSLSTYHQLKEILHEAIDDPTKLLDIENIITWSTVFEDHTIFETKLAEIEWLDPKKINELSGIRYRGWGQFSRKLLDGLKLGNGHTVIQELMLSNHNLMQILADETLKETMTELNQDKLKTDDIEDVINDAYTSPSNKKALRQVLRVVEDIKHAANGQDPSWLFIETADGTGTAGKRTQSRQKQIQTVYANAAQELIDSAVRGELEDKIADKASFTDRLVLYFMQGGRDIYTGAPLNIDQLSHYDIDHILPQSLIKDDSLDNRVLVNATINREKNNVFASTLFAGKMKATWRKWHEAGLISGRKLRNLMLRPDEIDKFAKGFVARQLVETRQIIKLTEQIAAAQYPNTKIIAVKAGLSHQLREELDFPKNRDVNHYHHAFDAFLAARIGTYLLKRYPKLAPFFTYGEFAKVDVKKFREFNFIGALTHAKKNIIAKDTGEIVWDKERDIRELDRIYNFKRMLITHEVYFETADLFKQTIYAAKDSKERGGSKQLIPKKQGYPTQVYGGYTQESGSYNALVRVAEADTTAYQVIKISAQNASKIASANLKSREKGKQLLNEIVVKQLAKRRKNWKPSANSFKIVIPRFGMGTLFQNAKYGLFMVNSDTYYRNYQELWLSRENQKLLKKLFSIKYEKTQMNHDALQVYKAIIDQVEKFFKLYDINQFRAKLSDAIERFEKLPINTDGNKIGKTETLRQILIGLQANGTRSNVKNLGIKTDLGLLQVGSGIKLDKDTQIVYQSPSGLFKRRIPLADL

SEQ ID NO: 123 - protein, 1234 aa, Prevotella tannerae
MPNFWSIFTENLQTYLMKTRILGLDTGTNSLGWAVVDRDENNQYTPICRGDLIFTEGVKQEKGIEFSLAAERTSYRASRRHYFRRRLRKVEVLKVLVKHKLCPPLSDEALNRWHTKKEYPLDEDFILWQRTNEADNKNPYHDRHICLHRKLNLKDSQTDRYTLGRALYHLTQRRGFLSNRLDQNEEAEETGKVKSAISELSKEMKEAGCEFLGDYFYLLYRTEGNRVRIRSRYTDREKHYLQEFKEICRVQELDEDLAKALEKTIFFQRPLKSQRQGVGKCTMEKGHSRCAVSHPLYEEYRLLCYLNNIRIKTPSDDRLRPLNAEEREKITPLFYKEKNFDFEKIAKKLAGKTPFGWIRDAEDWPYQFNYRMTQEAPACPTTAQLIKVFGEDWKAALAETYTMSAKQDGTLKTEDEICTDIWNVLYSFSSKEKLKEFGLKKLQLDEVQAKAFSEIRLTRDFASLSLKAIRKILFFLRTGEDYSKAIFLANIPTIVGEEIWNDIERRSRLLYKVDLALRPQEERDAEEHRTIAERIKAAVAAEVPDAPIDLLYHPSMIEAYPDAKRNERFDCYQLGSPKTNAVRNPMAMRSLHMVRKVINHLLRKHIIDEKTEIHIEYARELNDANKRQAIADWQRELSKRHTAYAQNIRQLYKAETGLVIEPTKADILKYQLWEEQQHVCLYTGKKIGIADFLGANPKFDIEHTIPRSRGGDSTQENLTLCESKFNRDIKRDKLPTELANYEEILARIEHWKKQCYALKLKRDGIRTHSGLEKSIKDSRIRRRHLVGLEYGYLKGKYDRFTMKEVPEGFSRRQGAGIGLISKYAGLFLKSLFKDPKNPNRSNVYVVKGAITAEFRKLWGLQQADEAKSRENHTHHCIDAYTIACIGPCEYAALAAYYRSDEEFKYGRRREKPQFEKPWPTFTEDLLKLQEELLIVHQTTDKLGKRDRRKVKTPRGKFLTGGDSARGRLHQETYYGAINYDGNIKYVVRKPLDSLTEKDLDKIVDETVMGIVKGAVEAKGSLKEALADGIYMNKEKGILIKRVRIFSDVSEPINLKQLRDVSTKEYKRHIHLRKDENYLFAIYEGIDKKKNKKQTETATVDYLDAAKFYKDSKRRDKANSLVGDYSKKNKLPLKCILKKRQMVLFYEHSPEEIRFKDKKDLSRRLYIVTSIAKDGRVKFLHHQAATATGIQSSPSPFTNDGEHQPYYRLSASNIKVLVAGIDFDINILGEITPKL

SEQ ID NO: 124 - protein, 1496 aa, Prevotella veroralis
MKTILGLDLGTNSIGWAKVCVDDNGNYLRDIKLGSRIIPMSQDVLGNFDKGVTESQTSVRTGFRGVRRIRERSLLRRERLHRVLHVLGYLPPHYDSAIGWNKNEPSTYGKFLNHGEPKLAWEHKEDGSMRFLFMESFHEMMADFAKSQPSLVSDGKKIPLDWTIYYLRKKALSQPIRKEELAWLLLNFNQKRGYYQLRGEEDDDNPTKCEEYYELKVVGIEADEEGKNGNTWYNVKLENGWIYRRQSKIPLDDWIGKVREFIVTTEYEKDGITLKKDKNGDVKRSFRSPSEDDWGLRKKRTEKLLDSSKMTVGAFVYDHLLAEPSDKIRGKFIRTIERKYYKKELYAILCEQSKYHEELRSGDYLNKCAEELYKNNQPHRNSLLTKDLAYLLLEDLIFYQRPLKTKKSLIAECPYEAYKYVDKETGEIKRQGIKCIAKSNPYYQEFRLWQFISNLRLFNKADDKEVTADYLPTQDDYVRLFAYLNDRKEINQETLLKEFFKLKKITVNSEKVFPIRWNYIEDKEKKYPCNETRHELLLALDRARIDHSWLEKPGQEYRLWHLLYSVESKEETKEALRKLKDDDAFVESFLKVKPFKREYGAYSEKAIKKLLAVMRMGSLWRETDICDTTKGNITKILQGEIDEKLKEKISASVSSYNQLSDFQGLPVWLACYVVYGRHSEAAEIQHWKTPESLLAYINGFKQHSLRNPIVEQCILETLRTVHDIWKEVGHIDEIHVELGRNMKSTADQRARISENVLRNENTNLRIKSLLLELKNDPNIKDVRPYSPMQQEKLRIYEEGVLQELTKDDKDFTEITKISTMAQPSAKELQRYKLWLEQKYRSPYTGKSISLTKLFTSAYQIEHVIPQSRYFDDSFSNKVICESEVNSLKDNMLGYEFIKNHGGEIIHCTMLGDVKVLSESEYKAFVNDHYAHNKRKRENLLLEDIPQEFLNRQMNDSRYISKVVKALLSNIVRAEGEEEATSKFVVSCSGGITDRLKKDWGLNDVWNKIVYPRFERLNRLTGTEAFGQWENKDGKRVFQTAVPLELQRGFNKKRIDHRHHAMDALVIACTSRNIINYLNNESANNPKKREDLRQKLCDKNRTIRKPWETFTQDATAALEDVIVSFKNYVRIINKATNYYERYDVEGKKVIAEQRGDDMWAIRKPMHEATYYGRVNLRRKKKVNLRVALENISSICDNKLRIYINGLVEKGFNTKQILDKFKNTNDHFSMQKIDKVEIWQFTNEEEKLVATRKPLDTSFDTKKIASITDTGIQTILLNYLETKGGDSTIAFTPEGIVEMNQNISKYNNGKEHMPILKVRLYTKLGKKIPVGQTGCKAKQFVIAEAGTNLYFAIYEDEEGKRSYRTIPLNEVVERLKQGLSPVPEKNDKDVHLKFYLSPNDLVYVPIEDEHESLAKDHIYKFVDSSGTTANFIPHRSANVIFELNKKDAEKFCSGSIIQNEYGVGSSQSKNQKAITGEMIKAVCRKLEVDRLGNVIKVI

SEQ ID NO: 125 - protein, 1082 aa, Neisseria cinerea
MAAFKPNPMNYILGLDIGIASVGWAIVEIDEEENPIRLIDLGVRVFERAEVPKTGDSLAAARRLARSVRRLTRRRAHRLLRARRLLKREGVLQAADFDENGLIKSLPNTPWQLRAAALDRKLTPLEWSAVLLHLIKHRGYLSQRKNEGETADKELGALLKGVADNTHALQTGDFRTPAELALNKFEKESGHIRNQRGDYSHTFNRKDLQAELNLLFEKQKEFGNPHVSDGLKEGIETLLMTQRPALSGDAVQKMLGHCTFEPTEPKAAKNTYTAERFVWLTKLNNLRILEQGSERPLTDTERATLMDEPYRKSKLTYAQARKLLDLDDTAFFKGLRYGKDNAEASTLMEMKAYHAISRALEKEGLKDKKSPLNLSPELQDEIGTAFSLFKTDEDITGRLKDRVQPEILEALLKHISFDKFVQISLKALRRIVPLMEQGNRYDEACTEIYGDHYGKKNTEEKIYLPPIPADEIRNPVVLRALSQARKVINGVVRRYGSPARIHIETAREVGKSFKDRKEIEKRQEENRKDREKSAAKFREYFPNFVGEPKSKDILKLRLYEQQHGKCLYSGKEINLGRLNEKGYVEIDHALPFSRTWDDSFNNKVLALGSENQNKGNQTPYEYFNGKDNSREWQEFKARVETSRFPRSKKQRILLQKFDEDGFKERNLNDTRYINRFLCQFVADHMLLTGKGKRRVFASNGQITNLLRGFWGLRKVRAENDRHHALDAVVVACSTIAMQQKITRFVRYKEMNAFDGKTIDKETGEVLHQKAHFPQPWEFFAQEVMIRVFGKPDGKPEFEEADTPEKLRTLLAEKLSSRPEAVHKYVTPLFISRAPNRKMSGQGHMETVKSAKRLDEGISVLRVPLTQLKLKDLEKMVNREREPKLYEALKARLEAHKDDPAKAFAEPFYKYDKAGNRTQQVKAVRVEQVQKTGVWVHNHNGIADNATIVRVDVFEKGGKYYLVPIYSWQVAKGILPDRAVVQGKDEEDWTVMDDSFEFKFVLYANDLIKLTAKKNEFLGYFVSLNRATGAIDIRTHDTDSTKGKNGIFQSVGVKTALSFQKYQIDELGKEIRPCRLKKRPPVR

SEQ ID NO: 126 - protein, 1512 aa, Fibrobacter succinogenes
MKKILGLDLGTNSIGWAVVNADEITRDDGSRYLKPNGISAAGSRIIPMSADILGDFEKGNSISQTAERTRMRMARRLHERALLRRERLLRVLNLLDFLPKHFADKIDRYGKFTDDSEPKLAWRKNTEGKYEFIFQDAFNEMLAEFKDKQPEIVEEGKKIPYDWTIYYLRKKALEKALSKEELSWILLQFNQKRGYYQLRGEEEEIPQDKKIEYLAQKVVKVEATDQKKGDDVWYNVYLENGMIYRRTSKAPLDWEGKVKEFIVTTEVENDGETPKKDKEGNIKRSFRAPKEDDWTLLKKKTEADIENSHKTVGCYIYDSLLNNPKQKIIGKLVRTVERKFYKEELTQILKKQVELIPELRDDNLYKQCIEELYPINEAHRNTIAKTDFANLFINDILFYQRPLKSKKSQIDNCPYEERIFIDSKTGEKKKVPVKCIAKSNPLFQEFRLWQFIQNLRIYQREKEIDGKLLTDIDITSECLKSEEDYVRLFDWLNDRETIEQEDLLKHLFNTKKSKNKENPYRWNYVEDKVYPCNETRATILKGFSKCGINASVLSPELEMALWHILYSVEDKKEIETALTHFAQKQGWNDDFAKVFSKAKPFKKDYGSYSEKAIKKLLSLMRMGKYWNQDNIDKNTLDRIDKIINGEYDEKISNRVRDNAINLKDISDFRGLPVWLACYIVYDRHSEAKDCTKWNSPEEIDSYLKKFKQHSLRNPIVEQVVTETLRTVRDIWIQEEQIDEIHLELGRDLKNPADKRKKMSENILKNENTNLRIKAMLMEFMNPSMGIENVRPYSPSQQDILRIYEENALDNLTKDDKDFDFISKISKQAQPSKTDIIRYKCWLEQKYRSPYTGKTISLSKLFTPAYEIEHVIPQSLYFDDSFSNKVICEAEVNKLKDRQLGYKFIAEHHGEKVQLSQGEVVEILSVDAYEKFVKENYANNRIKMKKLLMESIPDEFIERQLNDSRYISKVVKGLLSNIVREKIDDENYEPEAVSKNLISCNGAITDRLKKDWGMNDVWNSIILPRFIRMNQITGKDCFTTTNAEGHLIPQMPLELQKGFNKKRIDHRHHAMDAIVIACTTRDHVNLLNNEAAHSKFNATRYQLQRKLRRFEKAVIDGKEREVAKEFLKPWDSFSSDSKNILENIIVSFKQNQRVINKTTNAFLHFDENGKKTFIKQGKGDSWAIRKSMHKDTVFGEINLRKVRSVSLNEAIKVPERVLNKKIKEKILELKNNKIDAKNIKKYIEENHTGGYGIDSSKIDVFYFTKETKERFFATRKTLDTSFNQAKIKDSIADSGIQKILLAHLKSKNGDAEQAFSPDGIDEMNKNIVELNNGKFHQPILKVRVYEKADKFAVGQKGNKKVKFVEAAKGTNLFFAIFEKDGKRSYLTIPLNVMIDCQKQYGNQWKNNIEAYLKEKELVEKDVKLQFILSPNDLVYLPTEGSIDKKRIYKVVSFTNNRLYAIPYAIAKSIVDKNEFTQLNKIEFTDNKESIKDACVPVIIDRLGNVIEFNGKRL

SEQ ID NO: 127 - protein, 1259 aa, Streptobacillus moniliformis
MKYILGLDLGVASIGWAVTEINEKGEPVGLIDANSVIFKPLDNDKGKLYNVERRDKRGSRRILRRKKHRVERTKMLLVNSSFLTNEEIDNLYVGKLDNIYEVRLKGLKEQLSKNEIARLMIYYCKNRGFKSNRKTEDLEILKSLGEKISEKDSDEKKLKPIIAKNTELIESKGLTPIEVIYMIRENDNSILGFKNKEGNYKFGFKRNQVIDEVRKILGTQQILSKEIVDEYIDILSSQRDFSDGPGGDSKYKIDYTKLAGKCKYTGEVRAVKSAPSYEIFTMLQKLNDIRYVKFTSEDKIEKKKLSKEVIHKLYDLVVEKNKTLTYDLIEKSIDEENIKLLNIPKLSKSKYVELRKSYFKERNDNENLTEEEINAFNEKLNNERMKQELIRNNLKAYKELKSKFKKNNIDENRIKELGGIYFLDLVAELLTYSKTDEKLEYFVENVERYSLFKEQRDIVEIIKTFPNYTKNGNLSLSLVRELNKLLMEGHDYESSLSSLNYYIDTDVDWEKFPTISEIEDSLSTKITNPNVKHILVILRKLYNTLLFKYGRPEKVHLELSRDFSNDFSTRNKIQKEQLENKVRREVAAFEMYGANKDIVAGKDRLSNDDFVRIKLWEEQNKVCMYSGRTIEKYQLTSAEVQIDHILPYSKSFDNSYSNKVLVFSNENQDKKERTPYQWLKGTEKWNEFKQRVRLNLNISNKKKENLLFEDEVVNNEFLERELHATSYSSRLALNIFQRLIPVSDEDKYDEHGNEKVKYLYNRNVIAFQGKMTSMLRNLYSLNKYTHSFESDTLDIDNKAFILKEFEINKDNLKMTAYNVNTGLEITSETKVEKNKSGEFKTIKDELLKKELDKKENLIEISDYFKDKVLFDLKIVDFEEIDTVEPEIISILYKMITALKEEVYSKNRENHLHHSLDAFLLTIMNRSMQMKLIKYNQLISVLKNKEIEIFNEEKGEYIDSKEFAEELQKQKIIDIDGNERGIKFNVNGKTHRLNLVKPYENFLDDIKNKIFDKRENNKLPYHVVKSKVSGALHAETILGESKGEITKRISVFDINYKNLGKIFDKDGSQKEIYETLVKWLEAKSKDYPKLKNGNIIKKVKIVDGNKDKLIKLGNKRYVEMGRTTVKILVLKKEAEEGLKFASIGRYKYNLLKSEKDVNISIWKDAIHFCKVRYNKLKENGYRLIHELIPGETIELELNKGNISKCLVVGFSGGKIEISSVIGDALDLINDKISTRIKERYYITVSTIKSIKKINKNILGD

SEQ ID NO: 128 - protein, 1091 aa, Mobiluncus mulieris
MDSRKYRVGIDVGTNSVGFAAVEEDDSGSPTRFLNTMVVIHDSGVDPEQKKYAITRLASAGTARRTRRLYRTRRQRLRELDDFISNELGYPLVNLENFADPYEPWKVRADLATTKLPNDELPEAMSIALRHMARHRGWRSPYQRVEALHLHAEISKEFAALKERVVEKTGDVFSDDATPAEVLVDLMGRQKVRGADGVLSGKLRQSDNANELRKIASVQGIDDETLNRIIDRVFSSKSPKGKASERVGMDALPGQGSKPRALKAMPSFQKFRVVSVICNLRIKDSGGDARPLSMEEKEKLIDYLMSSTTDDHVTWTDVADLLHVKRSQLQGTAKEGFDGERPYTRPPVNSTWSKIKDSKIKSLVALWKTGDVDVQSAIVEALSNASVLEDSRPGADIVVAYLESLDDKELESLDKVGLPAGRASYSEDSLERLTERMLRDDCDLFEARKREFNVADDWKPPADPIYAPVGNPGVDRVLKIVNRLLMAAEREWGAPTQINIEHVRSGFSSELMQREFERENERRRAQNEEAVKAILTEKGGNSRVSKYDITRYYAVKRQHCQCLYCGTPITFSDCELDHIVPRKGVGSTNTRVNLAAACRSCNRDKSNLPFAVWAGKASNFDVSIDDAVSRVKQWQRSQNEGVREFRAFQNEVISRLLKTTEDPEIDSRSLESVAWMARELHHRVEYYFQSKGAQTQVSVYRGAVTAQARKSSGLEDKVKMIGGGGKTRLDRRHHAMDAATIALMTPGISTTLSEKNNLRDAQKFTGQSETWKDYCGRTETARKHFAVWKSNMERLTDLFNDKLENDAIPVVQPLRLRLSNSKAHDDGIGKLDSKKLGSVWSLADIDRAATPQIWTALTRCDDFDPTKGLPENANRVIRAQGVKYESEDNIPVFPSNVAAIAVRDGYAEIGSTIHHARIYRIDDGKKTFYSMIRVFAVDLLKHQAEDLFTVKLPPSAISIRTCEDSLRRALSNGTAEYLGWLVPGDEIIVDTSDKAFHTGQIGDLLRNFPVNSFRLTGFPSNSRLRLKPVLLAGEGLRDDAEDSIKKILLGQGWRPAINVLFSKGKPRIVRRNSLGIERPSSNNGLPFSWEA

SEQ ID NO: 129 - protein, 872 aa, Candidatus Parvarchaeum
MLGSSRYLRYNLTSFEGKEPFLIMGYYKEYNKELSSKAQKEFNDQISEFNSYYKLGIDLGDKTGIAIVKGNKIILAKTLIDLHSQKLDKRREARRNRRTRLSRKKRLARLRSWVMRQKVGNQRLPDPYKIMHDNKYWSIYNKSNSANKKNWIDLLIHSNSLSADDFVRGLTIIFRKRGYLAFKYLSRLSDKEFEKYIDNLKPPISKYEYDEDLEELSSRVENGEIEEKKFEGLKNKLDKIDKESKDFQVKQREEVKKELEDLVDLFAKSVDNKIDKARWKRELNNLLDKKVRKIRFDNRFILKCKIKGCNKNTPKKEKVRDFELKMVLNNARSDYQISDEDLNSFRNEVINIFQKKENLKKGELKGVTIEDLRKQLNKTFNKAKIKKGIREQIRSIVFEKISGRSKFCKEHLKEFSEKPAPSDRINYGVNSAREQHDFRVLNFIDKKIFKDKLIDPSKLRYITIESPEPETEKLEKGQISEKSFETLKEKLAKETGGIDIYTGEKLKKDFEIEHIFPRARMGPSIRENEVASNLETNKEKADRTPWEWFGQDEKRWSEFEKRVTSLYSKKKISERKREILLNKSNEYPGLNPTELSRIPSTLSDFVESIRKMFVKYGYEEPQTLVQKGKPIIQVVRGRDTQALRWRWHALDSNIIPEKDRKSSFNHAEDAVIAACMPPYYLRQKIFREEAKIKRKVSNKEKEVTRPDMPTKKIAPNWSEFMKTRNEPVIEVIGKVKPSWKNSIMDQTFYKYLLKPFKDNLIKIPNVKNTYKWIGVNGQTDSLSLPSKVLSISNKKVDSSTVLLVHDKKGGKRNWVPKSIGGLLVYITPKDGPKRIVQVKPATQGLLIYRNEDGRVDAVREFINPVIEMYNNG

SEQ ID NO: 130 - protein, 1229 aa, Pediococcus acidilactici
MGDRKYNLGLDIGTSSIGFAAVDENNQPIRVKGKTAIGVRLFEEGKTAADRRGFRTTRRRLSRRRWRINLLNEIFDAHLAEVDPTFLARLKESNRSNLDPKKSFQGSLLFPERKDYQFYEEYPTIYHLRKALMEKDRKFDIREIYLAVHHIIKYRGNFLNGTPMRSFKVENIELNTLFDQLNQLYAEIVPDNELAFDLAQVADVKDVLSSTTIYKMDKKKQLVKMMLLPASNKALQSENKKIVTQFVNAILNYKFKLDVLLQVETDADWSLKLNDEGADDKLEEFTGDLDENRLEIIDLLQRLHNWFSLNEITKDGNSLSAAMVEKYENHHHHLGLLKKVIENHPDAKKAKALKETYTAYVGKTDDKTQNQDDFYKAVEKNLDDSPDAKGIKRLIQLDQFMPKQRTGQNGAIPHQLHQQELDQIIEKQSKYYPFLAEPNPNVKRRKDAPYKLDELIAFKIPYYVGPLVTPEEQAQNKENVFAWMKRKAAGPITPWNFDEKVDRMESANRFIRRMTTKDTYLFGEDVLPAESMIYQKFVVLNELNNLKINGRHLSLKDKQDVYNDLFKQQKTVSIKALQNYYVTKKKAATAPTVGGLADPKKFLSSLSTYIDFKNMFGERVNDPQFQEDLEQIVEWSTIFEDRGIFKAKLQALGWLSEKQIQQLVAKRYKGWGRLSKKLLTGLKNAEGYSILDEMWRSTENFMQIQSRPEFAALIQQANEKQFEGNDPDNVWENIENILGDAYTSPQNKKAIRQVVKVVQDIEKAVGNPPEKIAIEFTREAAANPQRTQSRLRTLEKLYESAEEVVDAGLTAELAEFKENKHVLSDKYYLYFTQLGRDVYTGDTISLDKLNDYDVDHILPQSFIKDDSLDNRVLTIRAVNNGKSDNVPAKMFGKKMGSFWRHLLDNGMISKRKYNNLITDPDNISKYAQKGFINRQLVETSQVIKLTANILNGIYDKDTEIIEVPAKMNSQMRKMFDLVKVREVNDYHHAFDAYLTIFIGNYLYKCYPKLRPYFVYDNFKKFGNKEDIGHKRFNFLGKIEREKKVVAPETGEILWSNVAPNETIKQIKKVYNYKFMIVSREITTRRAELFNQTVYPKNYRGKLIPIKEDRPTDLYGGYSGNTDAYLAIVALEDKKKGKYFKVVGIPTRAAAKLEKLKQQDSQQYLQALHEVIAPQFTKSTKKGIKKTEFEIVLDKVHYRQLVQDGPVKMMLGSSTYKYNAKQLVLSEKAL

SEQ ID NO: 131 - protein, 1398 aa, Veillonella parvula
METQASNQLISSHLKGYPIKDYFVGLDIGTSSVGWAVTNKAYELLKFRSHKMWGSRLFDEGESAVARRGFRSMRRRLERRKLRLKLLEELFADAMAQVDPTFFMRLRESKYHYEDKTTGHSSKHILFIDKNYNDQDYFKEYPTVYHLRSELMKSGTDDIRKLFLAVHHILKYRGNFLYEGATFDSNASTLDDVIKQALENITFNCFDCNSAISSIGQILMEAGKTKSDKAKAIEHLVDTYIATDTVDTSSKTQKDQVKEDKKRLKAFANLVLGLNASLIDLFGSVEELEEDLKKLQITGDTYDDKRDELAKAWSDEIYIIDDCKSVYDAIILLSIKEPGLTISESKVKAFNKHKDDLAILKSLLKSDRSIYNTMFKVDEKGLHNYVHYIKQGRTEETSCNREDFYKYTKKIVEGLSDSKDKEYILSQIELQILLPLQRIKDNGVIPYQLHLEELKAILAKCGPKFPFLNEVADGFSVAEKLIKMLEFRIPYYVGPLNTHHNVDNGGFAWAVRKASGRVTPWNFDDKIDREKSAAAFIKNLTNKCTYLLGEDVLPKSSLLYSEFMLLNELNNVRIDGKPLEKVVKEHLIEAVFKQDHKKMTKNRIEQFLKDNGYISETHKHEITGLDGEIKNDLASYRDMVRILGDGFDRSMAEEIITDITIFGESKKMLRETLRKKFASCLDDEAIKKLTKLRYRDWGRLSQKLLNGIEGCDKAGDGTPETIIILMRNFSYNLMELLGDKFSFMERIQEINAKLTEGQIVNPHDIIDDLALSPAVKRAVWQALRIVDEVAHIKKALPARIFVEVTRSNKNEKKKKDSRQKRLSDLYAAIKKDDVLLNGLNNEIFGELKSSLAKYDDAALRSKKLYLYYTQMGRCAYTGEIIELSLLNTDNYDIDHIYPRSLTKDDSFDNLVLCKRTANAQKSDAYPISEEIQKTQKPFWTFLKQQGLISERKYERLTRITPLTADDLSGFIARQLVETNQSVKAATTLLRRLYPGVDVVFVKAENVTDFRHDNNFIKVRSLNHHHHAKDAYLNIVVGNVYHERFTRNFRAFFKKNGANRTYNLAKMFNYDVNCTNAKDGKAWDVKTSMDTVKKMMDSNDVRVTKRLLEQTGALADATIYKATVAGKAKDGAYIGMKTKSSVFADVSKYGGMTKIKNAYSIIVQYTGKKGEVIKEIVPLPIYLTNRNTTDQDLINYVASIIPQAKDISIIYGKLCINQLVKVNGFYYYLGGKTNSKFCIDNAIQVIVSNEWIPYLKVLEKFNNMRKDNKDLKANVVSTRALDNKHTIEVRIVEEKNIEFFDYLVSKLKMPIYQKMKGNKAAELSEKGYGLFKKMSLEEQSIHLIELLNLLTNQKTTFEVKPLGITASRSTVGSKISNQDEFKVINESITGLYSNEVTIV

SEQ ID NO: 132 - protein, 1485 aa, Prevotella bivia
MKNILGLDLGTNSIGWAKISIDDNGKYIKDSIKLGSRIIPMSQDVLSNFSKGVTLSQTSERTSFRGARRLRERTLLRRERLHRILHLLGFLPKHYEKAIGWDRNDNKTYGKFINHAEPKLAWCKDNNGKMRFLFMDSFHDMLSEFSEKHPELLANGKKIPLDWTIYYLRKKALYKAITKEELAWILLNFNQKRGYYQLRGEEDRDSEANKKEYLELKVIGVEATGEKKGNDIWYNIHLENGWIYRRSSKNPLNDWLGKVKSFIVTTDLDADGNPKKDKDGNIKRSFRAPSEGDWTLIKKRTESLLENSGQTVGQFIYNHILEEPSAKIRGNFIRTIERKYYKDELKAILEKQKEFHHELSSESLLTECAKELYKRNIAHQEVLLKKGIIHLLLNDILFYQRPLKIKKSLIDNCPYENYKYVDKKSGDIKVKSIKCIAKSNPFFQEFRLWQFVSNLRLYRKSDDKDVTSEHLVTTDDYANLFTYLNNRKDIKQSVLLKEYFKIKKVKTINGAEYPVRWNYIDDDNKTYPCNETRYDILHALSKTELKSEWLTPERTYRLWHLLYSIESKEETKKALNKLNLSDDFTEAFLTIKPFKKEYGSYSEKAIKKLLSLMRMGYLWSEDEAIKQVGAEIEKTIEGELPDYVLQRLEKSQHNYNKISDFSGLPLWLASYIIYGRHSEAKEIIHWDNPESMMAYIKDFRQHSMRNPIVEQCVLETLRTVHDIWKEIGHIDEIHIELGREMKSTSEQRKAITQNVLHNQNTNIRIKLLLQELKNDNNITGVRPYSPMQQEILRIYEEGALQGLTKEDKDYNDILKISQTAQPTSNELTRYKLWLEQKYRSPYTGKAISLSKLFTSAYQIEHVIPQSRYFDDSLSNKVICESEVNTLKKAMLGMEFIKTCGGQKVHCTLLGDVEIYNEEDYKAFVNEHYSNNRTKRNKLLMEDIPQEFINRQLNDSRYISKMVKQLLSAIVRGQEEVEATSKFVIPCTGGITDRLKKDWGLNDIWNNLVSPRFQRMNALTGSEYFGHWENKEGKRVFQTTMPIQLQQGFSKKRIDHRHHAMDALVIACASRNIISYLNNETAQDTERRRDLRQKLCDKGGSVRKPWDSFTQDTQYALKDIIVTFKNYVRIINKATNYYEHYKTDGKKGMISQKGDELWAIRKPMHKETVFGKVNLRRPKRVSLSKAIDSVDIICNRKLKKYIKARLNEGLQKKQILNIFKELNNVWEGIDVNKIDIWEMSNDKEPMVATRKQLDTSFDEKKIRSISDTGIQKILLNYLITKNNNPELAFTPEGIQEMNSNISEYNDHKKHQPIYKVRVTEPLGAKYPIGTMGNNPKKFVEAQAGTNLYFAIYEDKEGKRNYDTIPLNIAAERLNQQLSPVPETNENNTPLKFYLSPNDLVYVPSEEERHSGNNIQLDKNRIYKMVSSTSKRCFFIHHRVAISLVDKKEFSAQNKMERSIDNEQVMIKSVCWKLITDRLGNIIKVIK

SEQ ID NO: 133 - protein, 1218 aa, Prevotella buccalis
MNKRILGLDTGTNSLGWAVVDWDEHAQSYELIKYGDVIFQEGVKIEKGIESSKAAERSGYKAIRKQYFRRRLRKIQVLKVLVKYHLCPYLSDDDLRQWHLQKQYPKSDELMLWQRTSDEEGKNPYYDRHRCLHEKLDLTVEADRYTLGRALYHLTQRRGFLSNRLDTSADNKEDGVVKSGISQLSTEMEEAGCEYLGDYFYKLYHEQGNKVRIRQRYTDRKKHYQHEFDAICEKQELSSELIEDLQRAIFFQLPLKSQRHGVGRCTFERGKPRCADSHPDYEEFRMLCFVNNIQVKGPHDLELRPLTYEEREKIEHLFFRKSKPNFDFEDIAKELAGKKNYAWIHDKEERAYKFNYRMTQGVPGCPTTAQLKSIFGDDWKTGIAETYTLIQKKNGSKSLQEMVDDVWNVLYSFSSVEKLKEFAHHKLQLDEENAEKFAKIKLSHSFAALSLKAIRKFLPFLRKGMYYTHASFFANIPTIVGKEIWNNEQSRKYIMENVGELVFNYQPKHRDVQGTIEMLIKDFLANNFELPAGATDKLYHPSMIETYPHALRNEFGILQLGSPRTNAIRNPMAMRSLHVLRRVVNQLLKESIIDENTEVHVEYARELNDANKRRAIADRQKEQDKQHKKYGDEIRKLYKEETGKDIEPTQTDVLKFQLWEEQNHYCLYTGEQIGITDFIGSNPKFDIEHTIPQSVGGDSTQMNLTLCDNRFNREVKKAKLPTELANHEEILTRIEPWKNKYEQLVKERDKQRTFAGMDKAVKDIRIQKRHKLQMEIDYWRGKYERFTMTEVPEGFSRRQGTGIGLISRYAGLYLKSLFHQADSRNKSNVYVVKGVATAEFRKMWGLQSEYEKKCRDNHSHHCMDAITIACIGKREYDLMAEYYHMEETFRQGRGSKPKFSKPWATFTEDVLNIYKNLLVVHDTPNNMPKHTKKYVQTSKGKVLAQGDTARGSLHLDTYYGAIERDGEIRYVVRRPLSSFTNPKELENIVDETVKRTIKEAIADKNFKQAIAEPIYMNEDKGILIKKVRCFANSVKQPINIRQHRDLSKKEYKQQYHVMNENNYLLAIYEGLVKNKVVREFEIVSYIEAAKYYKRSQDRNIFSSIVPTHSTKYGLPLKTKLLMGQQVLMFEENPDEIQVDNTKDLVKRLYKVVGIEKDGRIKFKHHQEARKEGLTIYSTPYKNNDDYVPIFRQSIKNINILVDGIDFNIDILGKVTLKE

SEQ ID NO: 134 - protein, 1218 aa, Prevotella timonensis
MNKRILGLDTGTNSLGWAVVDWDEHAQSYELIKYGDVIFQEGVKIEKGIESSKAAERSGYKAIRKQYFRRRLRKIQVLKVLVKYHLCPYLSDDDLRQWHLQKQYPKSDELMLWQRTSDEEGKNPYYDRHRCLHEKLDLTVEADRYTLGRALYHLTQRRGFLSNRLDTSADNKEDGVVKSGISQLSTEMEEAGCEYLGDYFYKLYDAQGNKVRIRQRYTDRNKHYQHEFDAICEKQELSSELIEDLQRAIFFQLPLKSQRHGVGRCTFERGKPRCADSHPDYEEFRMLCFVNNIQVKGPHDLELRPLTYEEREKIEPLFFRKSKPNFDFEDIAKALAGKKNYAWIHDKEERAYKFNYRMTQGVPGCPTIAQLKSIFGDDWKTGIAETYTLIQKKNGSKSLQEMVDDVWNVLYSFSSVEKLKEFAHHKLQLDEESAEKFAKIKLSHSFAALSLKAIRKFLPFLRKGMYYTHASFFANIPTIVGKEIWNKEQNRKYIMENVGELVFNYQPKHREVQGTIEMLIKDFLANNFELPAGATDKLYHPSMIETYPNAQRNEFGILQLGSPRTNAIRNPMAMRSLHILRRVVNQLLKESIIDENTEVHVEYARELNDANKRRAIADRQKEQDKQHKKYGDEIRKLYKEETGKDIEPTQTDVLKFQLWEEQNHHCLYTGEQIGITDFIGSNPKFDIEHTIPQSVGGDSTQMNLTLCDNRFNREVKKAKLPTELANHEEILTRIEPWKNKYEQLVKERDKQRTFAGMDKAVKDIRIQKRHKLQMEIDYWRGKYERFTMTEVPEGFSRRQGTGIGLISRYAGLYLKSLFHQADSRNKSNVYVVKGVATAEFRKMWGLQSEYEKKCRDNHSHHCMDAITIACIGKREYDLMAEYYRMEETFKQGRGSKPKFSKPWATFTEDVLNIYKNLLVVHDTPNNMPKHTKKYVQTSIGKVLAQGDTARGSLHLDTYYGAIERDGEIRYVVRRPLSSFTKPEELENIVDETVKRTIKEAIADKNFKQAIAEPIYMNEEKGILIKKVRCFAKSVKQPINIRQHRDLSKKEYKQQYHVMNENNYLLAIYEGLVKNKVVREFEIVSYIEAAKYYKRSQDRNIFSSIVPTHSTKYGLPLKTKLLMGQLVLMFEENPDEIQVDNTKDLVKRLYKVVGIEKDGRIKFKYHQEARKEGLPIFSTPYKNNDDYAPIFRQSINNINILVDGIDFTIDILGKVTLKE

SEQ ID NO: 135 - protein, 1487 aa, Prevotella timonensis
MKNILGLDLGSNSVGWALVKVEENGNPIGSIKMGSRIIPMSQDILGSFEKGDTVSQTAQRTLYRGKRRLIERHVLRRERLCRVLHIMNFLPAHFDRLLGWDKTDNKTYGKFIDDSEPKLAWRQNKNEMGKMEFVFMDSFHEMLSDFAKHQPQLIANGKKVPLDWTIYYLRKKALTQLISKEELAWILLNFNKKRGYYQLRGEEEEEQPTKKEEYKVLKVISVDADEGQKGNGIWYNIHLEDGGIYKKKSDIPLYDWVGKTLQLIVVTTYEKDGKTPKIFDSGKQNPSYRLPKEDDWGLVKKRTESQLQSSGKTVGAFIYDNILSKPDDKIRGNLVRTIERKYYKKELIEILQQQAKYHDELHNQNLLESCAKELYAHNDVHYNEVIKSNMINLLVNDIIFYQRPLKSKKSLIANCKYESYEYVDKETGEIKEMPIKCIAKSNPYYQEFRLWQFIHNLRLSDVVTREDVTAQYLSTPQDYCNLFTYLNDRKEIKQDILLKDFFKIKKVQIDKEKVFPIEWNYIKDATKSYPCNETRYELLSALKRAGMDKQWLDDTPNMQYRLWHLLYSVEEKEESAKALRKLYDDDKFVTSFLKIKPFNKCYGAYSEKAIKRLLTLMRMGKAWNEQAIDAKTLKCIQQIITDNVDSKLKEKIDDSRYVLHHVSDFQGLPTYLASYVIYGRHSEVTDIQCWDSPEDLLKFIRDFKQHSLRNPIVEQVILETLRVVYDIWKAEKHIDEIHVEVAREMKLTAQQRNEANLRNLNNEATNLRIKYLLEELKNDTFIKDVRPLSPIHQEKMRIYEQAVLGNLNKQDKDYDDIIKISKKEHPTNAELIRYKLWLEQRYCSPYTGKAISLSKLFTTAYEIEHIIPQSRYFDNSFNNKVICEAEVNKAKGNMLGYEFIKKQGGQKIYCTQLGKAVTILKEEAYKQFVNEHYAHNKRKRDNLLAENIPESFSSRQLNDTRYITKTIMSLLSNVVRQQSEEEATAKNLLPSSGSVTDRLKNDWGLKDVWNTIVTPRFERLNKLSGTNDFGEMKEENGNRYFQTNVPLEYEKGFKKKRIDHRHHAMDALVIACTTRNMVNYISNANANSPKQREDLRQLLCDKNRIINKPWDTFTQDALKALNDIVVSFKNNVRIINRATNRYQRYDKNGKKIIFSQKGDDMWAIRKSMHKETVFGRVNLIRKEVLPIAKALDNISAICNAQLRAYVNDLVDKHFNKKQLVAHFKSLNYKWNRQDVSKVEVWISSDNKTPMVAVRKPLDTSFDKKKIASITDTGIQTILLNYLESKGGDASVAFAPEGIQEMNSNIELYNNGKAHKPIKNVRLSEPLGAKYQVGERGAKTKKYVEADKGTNLFFAIYEDEEGKRYYYSVPLREAIERQKQKLSPVPEYNEKGVALKFYLSPNDLVYVPTEEERTMGTCHIDKARIYKMVSSTGCSCYFVPSTFAKVIVDKVELQSLNKMEKAITDECIKEVCWKLKVDRLGNIINVIK

SEQ ID NO: 136 - protein, 1138 aa, Bifidobacterium dentium
MLCRCHRRYRIGIDVGLMSVGLAAIEVDETGFPIRILNIQSVIHDGGIDPQLGKKKSISRKAISGVARRTRRMRRRKVVRLRQLDATLESLGFPIVEPDSLDTWEIWLTRAKLASSYIQDDETRKEDVSIALRHIARHRGWRNPYSNVESLFVDVAPSEQYEELRRKAEEKLGTSLSGNPTSAEIVECILKRQVGEVQLRTRSRKGVNGNAVEKEGLLPTKLMQSDNAAEIRRIFKVQRIDDETGRKLLRAVFKACSPKGSVERRVGRDALAPGLPRALKASLAFQEYRIANVLTNLVISEDGTKRKLTIAEKQRVFGFLSSNETDDITWIDVAEKLGLERRQIQGVGCLTADGEERISSTPPRNITALHIHSAKPVIREKLVAWWKAASPTVRETMVELLSNTVDIDRVREDMDYSSAVAFIDSLGDEELTALDSVDLLSGRAAYSRQTLKQLTERMLNTDDDLHEARKAVFGVDDNWKPPVDAISTSVGNPAVDRVLKIVNRYLLACQKRWRNPQSVQIEHVRESFSSVAKAKETERVQGERARYRNDLRRELCEQEGLNKIRESDIRRWESVQRQNGTCLYCGSPITFRTCEMDHIVPRKGVGSTNTRVNLAAACAACNKLKSNTAFSVWARTEGAANRKVSQRDAIERVKTFIFNKSVPPREQRAFKQAVISRLRQAESDPAIDNRSIESVAWMADELHRRIEAYFNQDADVSGNTPATQVWVFQGRVTALARKASGIEGRIHFAGEWKKTRLDRRHHAVDAAVIAMMNHSAAQTLVERDSLRLSQWITRKPETWKNYPFSEGQKKTRFKEWLDCMNALLDLLNDALDSDRVPVTRCQRMSLGNSQAHAATIRKMKRVELFSPMDADLIRRASTPALYCALTRLPEYSPEKGLPENRGREIVLNGRHIRSTETVDFFASGAAQLMVRNGSAEIGDSIHHMRIYRYRKTGAKSQEYVYGMIRVFQIDLLHASSENLFAVQLPSQSVSVRYGDKNVVQAIQEGRAEYLGHIVPNDEILISYEGVRMKDSEKIGAYANDFSGTASELAQRRHWVVVGSDVSKLALRPSYLSEEGLENSGSESERLSKQTRKVIEGKGWVVAVNILAKYHPVVIRRNALGEPRFRTNSGMPVSWRWDR

SEQ ID NO: 137 - protein, 587 aa, Neisseria subflava
MATSRSRIRSQTDAFGVVGSLVAFNQTSRLFVAKKNEGETADKELGALLKGVADNAHALQTGNFRTPAELALNKFEKESGHIRNQRGDYSHTFNRKDLQAELNLLFEKQKEFGNPHVSDGLKEGIETLLMAQRPALSGDAVQKMLGYCTFEPTEPKAAKNTYTAGRFIWLTKLNNLRILEQGSERPLTTTERATLMDEPYRKSKLTYAQARKLLGLEDTAFFKGLRYGKDNAEASTLMEMKAYHAISRALEKEGLKDKKSPLNLSPELQDEIGTAFSLFKTDEDITGRLKDRVQPEILEALLKHISFDKFVQISLKALRRIVPLMEQGKRYDEACAEIYGDHYGKKNAEEKIYLPPIPADEIRNPVVLRALSQARKVINAVVRRYGSPARIHIETAREVGKSFKDRKEIEKRQEENRKDREKAAAKFREYFPNFVGEPKSKDILKLRLYEQQHGKCLYSGKEINLGRLNEKGYIEIDHALPFSRTWDDSFNNKVLVLGSENQNKGNQTPYEYFNGKDNSREWQEFKARVETSRFPRSKKQRILLQKFDEDGIYRIGVKTALSFPKYQIDELGKEIRPCRLKKRPPVR

SEQ ID NO: 138 - protein, 1269 aa, Mycoplasma gallisepticum
MNNSIKSKPEVTIGLDLGVGSVGWAIVDNETNIIHHLGSRLFSQAKTAEDRRSFRGVRRLIRRRKYKLKRFVNLIWKYNSYFGFKNKEDILNNYQEQQKLHNTVLNLKSEALNAKIDPKALSWILHDYLKNRGHFYEDNRDFNVYPTKELAKYFDKYGYYKGIIDSKEDNDNKLEEELTKYKFSNKHWLEEVKKVLSNQTGLPEKFKEEYESLFSYVRNYSEGPGSINSVSPYGIYHLDEKEGKVVQKYNNIWDKTIGKCNIFPDEYRAPKNSPIAMIFNEINELSTIRSYSIYLTGWFINQEFKKAYLNKLLDLLIKTNGEKPIDARQFKKLREETIAESIGKETLKDVENEEKLEKEDHKWKLKGLKLNTNGKIQYNDLSSLAKFVHKLKQHLKLDFLLEDQYATLDKINFLQSLFVYLGKHLRYSNRVDSANLKEFSDSNKLFERILQKQKDGLFKLFEQTDKDDEKILAQTHSLSTKAMLLAITRMTNLDNDEDNQKNNDKGWNFEAIKNFDQKFIDITKKNNNLSLKQNKRYLDDRFINDAILSPGVKRILREATKVFNAILKQFSEEYDVTKVVIELARELSEEKELENTKNYKKLIKKNGDKISEGLKALGISEDEIKDILKSPTKSYKFLLWLQQDHIDPYSLKEIAFDDIFTKTEKFEIDHIIPYSISFDDSSSNKLLVLAESNQAKSNQTPYEFISSGNAGIKWEDYEAYCRKFKDGDSSLLDSTQRSKKFAKMMKTDTSSKYDIGFLARNLNDTRYATIVFRDALEDYANNHLVEDKPMFKVVCINGSVTSFLRKNFDDSSYAKKDRDKNIHHAVDASIISIFSNETKTLFNQLTQFADYKLFKNTDGSWKKIDPKTGVVTEVTDENWKQIRVRNQVSEIAKVIEKYIQDSNIERKARYSRKIENKTNISLFNDTVYSAKKVGYEDQIKRKNLKTLDIHESAKENKNSKVKRQFVYRKLVNVSLLNNDKLADLFAEKEDILMYRANPWVINLAEQIFNEYTENKKIKSQNVFEKYMLDLTKEFPEKFSEFLVKSMLRNKTAIIYDDKKNIVHRIKRLKMLSSELKENKLSNVIIRSKNQSGTKLSYQDTINSLALMIMRSIDPTAKKQYIRVPLNTLNLHLGDHDFDLHNMDAYLKKPKFVKYLKANEIGDEYKPWRVLTSGTLLIHKKDKKLMYISSFQNLNDVIEIKNLIETEYKENDDSDSKKKKKANRFLMTLSTILNDYILLDAKDNFDILGLSKNRIDEILNSKLGLDKIVK

SEQ ID NO: 139 - protein, 1354 aa, Prevotella melaninogenica
MADFAKYQPGMVADGRKIPLDWTLYYLRKKALTQAIRKEELAWILLNFNQKRGYYQLRGEEEEENSTKHEEYYELKVVSVEAAEEGKGGNTWYNVTLENGWIYRRQSKIELNDWVGKVRPFIVTTEYEIDGVTIKKDKNGEVKRSFRAPSENDWGLRKKRTESLLEESGKTVGAFIYNHILSEPADKIRGNFIRTIERKFYKKELEAILREQSKHQKELKDIDTLIACIKELYPNNKPHQDSLIKKDMTYLLITDLIFYQRPLKSKKSLIADCPYEYYEYVIKETGENKRQSIKCIAKSNPYYQEFRLWQFIINLRLFDRNNDKEVTSEYLSSMEDYTRLFTYLNDRKDINQETLLKDFFKQKKVKRGMEKEFPIRWNYIEDKEKKYPCNETRHELLTALGKVGIDHSWLDDKELFYRLWHLLYSVESKEEAEGALRKLVDNDDFVNAFLKIKPFKKEYGAYSEKAIKKLLAVMRMGNLWNEVDICEQTRDRIQNIIKGDIDEKIKDRMGRTFSQLSDFQGLPEWLACYVVYGQHSEATDIQRWTKPENLMAYINGFKQHSLRNPIVEQCILETLRTVHDIWKEAGHIDEIHIELGRGMKSTADQRARMSKSIMQNENTNLRIKSLLMELKNAKEFENVRPYSPMQQEILRIYEEGALQELTKEDAQYNEISKISQMAQPSANELLKYRLWLEQKYCSPYTGKPISLSKLFTSAYQIEHIIPQSRYFDDSFTNKVICEAEVNQLKSNMLGYEFIKKHGGEIVRCTMIGDVKLLDAKEYYNFVTEHYTNNRRKKEKLLMEDIPQEFLNRQMNDSRYISKKVMAILSNIVREEDEQEAKSKFVIACSGGITDRLKQDWGLNDVWNSIVYPRFERLNKLTNTENFGRWENKKGKQVFQTSVPLELQKDFSKKRIDHRHHAMDALVIACASNNIINYLNNESAKSQEKREDLRKKLCDKNRIIRKPWETFTQDAHTALENVVVSFKNYIRVINKATNYYEKYDKNGKKEIAEQKGQDMWAIRKPMHKETVFGQVNLRRKITIKLKDALEKIPAICDKELRDYINILVAKQFNKKQILAHFKSINYRLNMKSVDKVDVWQFSNEKEPMVATRKSVDTSFDTKRIATITDTGIQKILLNYLKAKNNDPNIAFTPEGIAEMNKHITEYNNGKQHQPILKVRVSEPKGAKYQVGETGNKRSKFVEAQKGTNLYFAIYEDKEGNRSYNTIPLNEVIERLKQGLSPVPDANEKSIPLKFHLSPNDLVYVPKTDEENEIKMGQIYKFVDSSGTTANFVPHRVSNLIYNVDKKIAENFCNHEIIQNEYGIGSPQSKNQKSITGEMIKAVCWKLEVDRLGNIHKIIK

SEQ ID NO: 140 - protein, 1130 aa, Streptococcus gallolyticus
MTNGKILGLDIGIASVGVGIIEAKTGKVVHANSRLFSAANAENNAERRGFRGSRRLNRRKKHRVKRVRDLFEKYEIVTDFRNLNLNPYELRVKGLTEQLTNEELFAALRTISKRRGISYLDDAEDDSTGSTDYAKSIDENRRLLKTKTPGQIQLERLEKYGQLRGNFTVYDENGEAHRLINVFSTSDYEKEARKILETQADYNKKITAEFIDDYVEILTQKRKYYHGPGNEKSRTDYGRFRTDGTTLENIFGILIGKCSFYPDEYRASKASYTAQEYNFLNDLNNLKVPTETGKLSTEQKEALVEFAKSTATLGPAKLLKEIAKILDCKVDEIKGYREDDKGKPDLHTFEPYRKLKFNLDSVNIDDLSREVLDKLADILTLNTEREGIEDAIRHNLPNQFTEGQISEIIKVRKSQSTAFNKGWHSFSAKLMNELIPELYATSDEQMTILTRLEKFKVNKKSSKNTKTIDEKEVTDEIYNPVVAKSVRQTIKIINAAVKKYGDFDKIVIEMPRDKNADDEKKFIDKRNKENKKEKDDALKRAAYLYNGTDKLPDEVFHGNKQLETKIRLWYQQGERCLYSGKPIPIQELVHNSNNFEIDHILPLSLSFDDSLANKVLVYAWTNQEKGQKTPYQVIDSMDAAWSFREMKDYVLKQKGLGKKKRDYLLTTENIDKIEVKKKFIERNLVDTRYASRVVLNSLQSALRELGKDTKISVIRGQFTSQLRRKWKIDKSRETYHHHAVDALIIAASSQLKLWEKQDNPMFVDYGNNQVVDKQTGEILSVSDDEYKELVFQPPYQGFVNMISSKGFEDEILFSYQVDSKYNRKVSDATIYSTRKAKIGKDKKEETYVLGKIKDIYSQNGFDTFIKKYNKDKTQFLMYQKDPLTWENVIEVILRDYPTTKKSEDGKNDVKCNPFEEYRRENGLVCKYSKKGKGTPIKSLKYYDKKLGNCIDITPEGSKNEVVLQSLNPWRADVYFNPETLKYELLGLKYSDLSFEKGTGKYHISQEKYDVIKEKEGIGKKSEFKFTLYRNDLILIKDTASGEQEIYRFLSRTMPNVKHYAELKPYDKEKFDNVQELVEALGEADKVGRCIKGLNKSNLSIYKVRTDVLGNKYFVKKEGDKPKLDFKNNKK

SEQ ID NO: 141 - protein, 1371 aa, Streptococcus gallolyticus
MTEKNYSIGLDIGTNSVGWAVITDDYKVPAKKMKVLGNTDKKYIKKNLLGALLFDNGETAEATRLKRTARRRYTRRKNRLRYLQEIFAEEMAKVDESFFYRLDESFLTTDDKDFERHPIFGNKADEIKYHQEFPTIYHLRKHLADSHEKADLRLIYLALAHMIKFRGHFLIEGELNAENTDVQKLFEAFVEVYDRTFDDSNLSEITVDASSILTEKFSKSRRLENLIKHYPTEKKNTLFGNLVALALGLQPNFKTSFKLSEDAKLQFSKDTYEEDLEELIGKIGDEYADLFTSAKNLYDAILLSGILTVADNTTKAPLSASMIKRYNEHQVDLKKLKEFIKNNASDKYDEIFNDKDKNGYAGYIENGVKQDEFYKYLKTTLSKIDGSDYFLDKIEREDFLRKQRTFDNGSIPHQIHLQEMHAILRRQGEHYAFLKENQAKIEKILTFRIPYYVGPLARKNSRFAWAEYHSDEKITPWNFDEIIDKEKSAEKFITRMTLNDLYLPEEKVLPKHSLVYETYTVYNELTKVKYVNEQGKSNFFDANMKQEIFEHVFKENRKVTKDKFLNYLNKEFPEYRIQDLIGLDKENKSFNASLGTYHDLKKILDKSFLDDKTNETIIEDIIQTLTLFEDRDMIRQRLQKYSDIFTPQQLKKLERRHYTGWGRLSYKLINGIRNKENGKSILDYLIDDGYANRNFMQLISDDTLPFKQIIKDAQIIGDIDDVTSVVRELPGSPAIKKGILQSVKIVDELVKVMGHNPDNIVIEMARENQTTNRGRNQSQQRLKKLQDSLKELGSNILNEEKPSYIEGKVENNHLQDDRLFLYYIQNGKDMYTGDELDIDHLSDYDIDHIIPQAFIKDDSIDNRVLTSSAKNRGKSDDVPSLDIVHDRKADWIRLYKSGLISKRKFDNLTKAERGGLTENDKAGFIKRQLVETRQITKHVAQILDSRFNTERDENDKVIRNVKVITLKSNLVSQFRKDFKFYKVREINDYHHAHDAYLNAVVGTALLKKYPKLAPEFVYGEYKKYDIRKFITSSGDKATAKYFFYSNLMNFFKRVIRYSNGKVVVRPVIECSKDTGEIAWNKQTDFEKVRRVLSYPQVNIVKKVETQTGGFSKESILPKGNSDKLIPRKTKKFRWDTPKYGGFDSPNIAYSVFVIADVEKGKAKKLKTVKELVGISIMERSSFEENPVVFLEKKGYQNVQEDNLIKLPKYSLFEFEGGRRRLLASASELQKGNEVVLSRHLVELLYHAHRVNSFNNSEHLKYVSEHKKEFGEVLSCVENFAKSYVDVEKNLGKIRAVADKIDTFSIEDISISFVNLLTLTALGAPADFNFLGEKIPRKRYTSTKECLNATLIHQSITGLYETRIDLSKLGEE

SEQ ID NO: 142 - protein, 1168 aa, Azospirillum sp.
MARPAFRAPRREHVNGWTPDPHRISKPFFILVSWHLLSRVVIDSSSGCFPGTSRDHTDKFAEWECAVQPYRLSFDLGTNSIGWGLLNLDRQGKPREIRALGSRIFSDGRDPQDKASLAVARRLARQMRRRRDRYLTRRTRLMGALVRFGLMPADPAARKRLEVAVDPYLARERATRERLEPFEIGRALFHLNQRRGYKPVRTATKPDEEAGKVKEAVERLEAAIAAAGAPTLGAWFAWRKTRGETLRARLAGKGKEAAYPFYPARRMLEAEFDTLWAEQARHHPDLLTAEAREILRHRIFHQRPLKPPPVGRCTLYPDDGRAPRALPSAQRLRLFQELASLRVIHLDLSERPLTPAERDRIVAFVQGRPPKAGRKPGKVQKSVPFEKLRGLLELPPGTGFSLESDKRPELLGDETGARIAPAFGPGWTALPLEEQDALVELLLTEAEPERAIAALTARWALDEATAAKLAGATLPDFHGRYGRRAVAELLPVLERETRGDPDGRVRPIRLDEAVKLLRGGKDHSDFSREGALLDALPYYGAVLERHVAFGTGNPADPEEKRVGRVANPTVHIALNQLRHLVNAILARHGRPEEIVIELARDLKRSAEDRRREDKRQADNQKRNEERKRLILSLGERPTPRNLLKLRLWEEQGPVENRRCPYSGETISMRMLLSEQVDIDHILPFSVSLDDSAANKVVCLREANRIKRNRSPWEAFGHDSERWAGILARAEALPKNKRWRFAPDALEKLEGEGGLRARHLNDTRHLSRLAVEYLRCVCPKVRVSPGRLTALLRRRWGIDAILAEADGPPPEVPAETLDPSPAEKNRADHRHHALDAVVIGCIDRSMVQRVQLAAASAEREAAAREDNIRRVLEGFKEEPWDGFRAELERRARTIVVSHRPEHGIGGALHKETAYGPVDPPEEGFNLVVRKPIDGLSKDEINSVRDPRLRRALIDRLAIRRRDANDPATALAKAAEDLAAQPASRGIRRVRVLKKESNPIRVEHGGNPSGPRSGGPFHKLLLAGEVHHVDVALRADGRRWVGHWVTLFEAHGGRGADGAAAPPRLGDGERFLMRLHKGDCLKLEHKGRVRVMQVVKLEPSSNSVVVVEPHQVKTDRSKHVKISCDQLRARGARRVTVDPLGRVRVHAPGARVGIGGDAGRTAMEPAEDIS

SEQ ID NO: 143 - protein, 1345 aa, Streptococcus mutans
MKKPYSIGLDIGTNSVGWAVVTDDYKVPAKKMKVLGNTDKSHIKKNLLGALLFDSGNTAADRRLKRTARRRYTRRRNRILYLQEIFAEEMSKVDDSFFHRLEDSFLVTEDKRGERHPIFGNLEEEVKYHENFPTIYHLRQYLADNPEKVDLRLVYLALAHIIKFRGHFLIEGKFDTRNNDVQRLFQEFLAVYDNTFENSSLQEQNVQVEEILTDKISKSAKKDRVLKLFPNEKSNGRFAEFLKLIVGNQADFKKHFELEEKAPLQFSKDTYEEELEVLLAQIGDNYAELFLSAKKLYDSILLSGILTVTDVSTKAPLSASMIQRYNEHQMDLAQLKQFIRQKLSDKYNEVFSDVSKDGYAGYIDGKTNQEAFYKYLKGLLNKIEGSGYFLDKIEREDFLRKQRTFDNGSIPHQIHLQEMRAIIRRQAEFYPFLADNQDRIEKILTFRIPYYVGPLARGKSDFAWLSRKSADKITPWNFDEIVDKESSAEAFINRMTNYDLYLPNQKVLPKHSLLYEKFTVYNELTKVKYKTEQGKTAFFDANMKQEIFDGVFKVYRKVTKDKLMDFLEKEFDEFRIVDLTGLDKENKAFNASYGTYHDLRKILDKDFLDNSKNEKILEDIVLTLTLFEDREMIRKRLENYSDLLTKEQVKKLERRHYTGWGRLSAELIHGIRNKESRKTILDYLIDDGNSNRNFMQLINDDALSFKEEIAKAQVIGETDNLNQVVSDIAGSPAIKKGILQSLKIVDELVKIMGHQPENIVVEMARENQFTNQGRRNSQQRLKGLTDSIKEFGSQILKEHPVKHSQLQNDRLFLYYLQNGRDMYTGEELDIDYLSQYDIDHIIPQAFIKDNSIDNRVLTSSKENRGKSDDVPSKNVVRKMKSYWSKLLSAKLITQRKFDNLTKAERGGLTDDDKAGFIKRQLVETRQITKHVARILDERFHTETDENNKKIRQVKIVTLKSNLVSNFRKEFELYKVREINDYHHAHDAYLNAVIGKALLGVYPQLEPEFVYGDYPHFHGHKENKATAKKFFYSNIMNFFKKDDVRTDKNGEIIWKKDEHISNIKKVLSYPQVNIVKKVEEQTGGFSKESILPKGNSDKLIPRKTKKFYWDTKKYGGFDSPIVAYSILVIADIEKGKSKKLKTVKALVGVTIMEKMTFERDPVAFLERKGYRNVQEENIIKLPKYSLFKLENGRKRLLASARELQKGNEIVLPNHLGTLLYHAKNIHKVDEPKHLDYVDKHKDEFKELLDVVSNFSKKYTLAEGNLEKIKELYAQNNGEDLKELASSFINLLTFTAIGAPATFKFFDKNIDRKRYTSTTEILNATLIHQSITGLYETRIDLSKLGGD

SEQ ID NO: 144 - protein, 1024 aa, Helicobacter mustelae
MIRTLGIDIGIASIGWAVIEGEYTDKGLENKEIVASGVRVFTKAENPKNKESLALPRTLARSARRRNARKKGRIQQVKHYLSKALGLDLECFVQGEKLATLFQTSKDFLSPWELRERALYRVLDKEELARVILHIAKRRGYDDITYGVEDNDSGKIKKAIAENSKRIKEEQCKTIGEMMYKLYFQKSLNVRNKKESYNRCVGRSELREELKTIFQIQQELKSPWVNEELIYKLLGNPDAQSKQEREGLIFYQRPLKGFGDKIGKCSHIKKGENSPYRACKHAPSAEEFVALTKSINFLKNLTNRHGLCFSQEDMCVYLGKILQEAQKNEKGLTYSKLKLLLDLPSDFEFLGLDYSGKNPEKAVFLSLPSTFKLNKITQDRKTQDKIANILGANKDWEAILKELESLQLSKEQIQTIKDAKLNFSKHINLSLEALYHLLPLMREGKRYDEGVEILQERGIFSKPQPKNRQLLPPLSELAKEESYFDIPNPVLRRALSEFRKVVNALLEKYGGFHYFHIELTRDVCKAKSARMQLEKINKKNKSENDAASQLLEVLGLPNTYNNRLKCKLWKQQEEYCLYSGEKITIDHLKDQRALQIDHAFPLSRSLDDSQSNKVLCLTSSNQEKSNKTPYEWLGSDEKKWDMYVGRVYSSNFSPSKKRKLTQKNFKERNEEDFLARNLVDTGYIGRVTKEYIKHSLSFLPLPDGKKEHIRIISGSMTSTMRSFWGVQEKNRDHHLHHAQDAIIIACIEPSMIQKYTTYLKDKETHRLKSHQKAQILREGDHKLSLRWPMSNFKDKIQESIQNIIPSHHVSHKVTGELHQETVRTKEFYYQAFGGEEGVKKALKFGKIREINQGIVDNGAMVRVDIFKSKDKGKFYAVPIYTYDFAIGKLPNKAIVQGKKNGIIKDWLEMDENYEFCFSLFKNDCIKIQTKEMQEAVLAIYKSTNSAKATIELEHLSKYALKNEDEEKMFTDTDKEKNKTMTRESCGIQGLKVFQKVKLSVLGEVLEHKPRNRQNIALKTTPKHV

SEQ ID NO: 145 - protein, 765 aa, Butyrivibrio fibrisolvens
MGITIGLDLGVASVGWAVVNDDYEILESCSNIFPSADASKNSERRGFRQGRRLTRRRKNRIHDFQKLWEDKGFVIPSQGTEDVLAIKIKGLSEKLSVDEVYWVLLNSLKHRGISYLDDADSGDNSSDYAKSISRNEEELKEKLPCEIQWERLQKYGAYRGNISIVEDGEPITLRNVFTTSAYKKEVEQFIDTQAKYNAQYSGDFKADYLEIFNRKREYYEGPGNELSRTDYGKYTTEINADGEYITVDNIFDKLVGKCSVNPDERRAAGASYTAQEFNVLNDLNNLTISSESSFIEDGKLTEDAKRKIIETIKNAKTVNVKKIICDVIGDKKCQISGARIDKNEKEIFHSFEAYNKMRRALEEIGFDISSLSRENLDLIGDILTLNTDRESILNAFNRKGIELADEAKDILVKVRKTNGSLFNKWQSFGLSIMNELIPELYAQPKNQMELLTAMGVFKSRGDRFLECKEIPGDLIVDDIYNPVVSKTVRITVRILNALIKKYGYPDRVVIEMPRDKNSDEEQQRLKKEQRDNENEIKDIKARVKTEYGREITEEDFRQHSKLSLKLKLWNEQQGICPYSGKSIKIDDLLDNPNLFEVDHIIPLSISFDDSRNNKVLVYSSENQDKGNRTPLAYLASVNRQWDIHSFMDYVLKTYAGAQKRKKRDNLLNEQDITKVEVLQGFVNRNINDTRYASKVVLNSLQEYFSSKECSTKVKVIRGSFTHQMRVNLKLKKTVMNHMFIMQLMQCLLLFHRWDMTLIMNLQISI

SEQ ID NO: 146 - protein, 1338 aa, Coprococcus catus
MKQEYFLGLDMGTGSLGWAVTDSTYQVMRKHGKALWGTRLFESASTAEERRMFRTARRRLDRRNWRIQVLQEIFSEEISKVDPGFFLRMKESKYYPEDKRDAEGNCPELPYALFVDDNYTDKNYHKDYPTIYHLRKMLMETTEIPDIRLVYLVLHHMMKHRGHFLLSGDISQIKEFKSTFEQLIQNIQDEELEWHISLDDAAIQFVEHVLKDRNLTRSTKKSRLIKQLNAKSACEKAILNLLSGGTVKLSDIFNNKELDESERPKVSFADSGYDDYIGIVEAELAEQYYIIASAKAVYDWSVLVEILGNSVSISEAKIKVYQKHQADLKTLKKIVRQYMTKEDYKRVFVDTEEKLNNYSAYIGMTKKNGKKVDLKSKQCTQADFYDFLKKNVIKVIDHKEITQEIESEIEKENFLPKQVTKDNGVIPYQVHDYELKKILDNLGTRMPFIKENAEKIQQLFEFRIPYYVGPLNRVDDGKDGKFTWSVRKSDARIYPWNFTEVIDVEASAEKFIRRMTNKCTYLVGEDVLPKDSLVYSKFMVLNELNNLRLNGEKISVELKQRIYEELFCKYRKVTRKKLERYLVIEGIAKKGVEITGIDGDFKASLTAYHDFKERLTDVQLSQRAKEAIVLNVVLFGDDKKLLKQRLSKMYPNLTTGQLKGICSLSYQGWGRLSKTFLEEITVPAPGTGEVWNIMTALWQTNDNLMQLLSRNYGFTNEVEEFNTLKKETDLSYKTVDELYVSPAVKRQIWQTLKVVKEIQKVMGNAPKRVFVEMAREKQEGKRSDSRKKQLVELYRACKNEERDWITELNAQSDQQLRSDKLFLYYIQKGRCMYSGETIQLDELWDNTKYDIDHIYPQSKTMDDSLNNRVLVKKNYNAIKSDTYPLSLDIQKKMMSFWKMLQQQGFITKEKYVRLVRSDELSADELAGFIERQIVETRQSTKAVATILKEALPDTEIVYVKAGNVSNFRQTYELLKVREMNDLHHAKDAYLNIVVGNAYFVKFTKNAAWFIRNNPGRSYNLKRMFEFDIERSGEIAWKAGNKGSIVTVKKVMQKNNILVTRKAYEVKGGLFDQQIMKKGKGQVPIKGNDERLADIEKYGGYNKAAGTYFMLVKSLDKKGKEIRTIEFVPLYLKNQIEINHESAIQYLAQERGLNSPEILLSKIKIDTLFKVDGFKMWLSGRTGNQLIFKGANQLILSHQEAAILKGVVKYVNRKNENKDAKLSERDGMTEEKLLQLYDTFLDKLSNTVYSIRLSAQIKTLTEKRAKFIGLSNEDQCIVLNEILHMFQCQSGSANLKLIGGPGSAGILVMNNNITACKQISVINQSPTGIYEKEIDLIKL

SEQ ID NO: 147 - protein, 1035 aa, Candidatus Puniceispirillum
MRRLGLDLGTNSIGWCLLDLGDDGEPVSIFRTGARIFSDGRDPKSLGSLKATRREARLTRRRRDRFIQRQKNLINALVKYGLMPADEIQRQALAYKDPYPIRKKALDEAIDPYEMGRAIFHINQRRGFKSNRKSADNEAGVVKQSIADLEMKLGEAGARTIGEFLADRQATNDTVRARRLSGTNALYEFYPDRYMLEQEFDTLWAKQAAFNPSLYIEAARERLKEIVFFQRKLKPQEVGRCIFLSDEDRISKALPSFQRFRIYQELSNLAWIDHDGVAHRITASLALRDHLFDELEHKKKLTFKAMRAILRKQGVVDYPVGFNLESDNRDHLIGNLTSCIMRDAKKMIGSAWDRLDEEEQDSFILMLQDDQKGDDEVRSILTQQYGLSDDVAEDCLDVRLPDGHGSLSKKAIDRILPVLRDQGLIYYDAVKEAGLGEANLYDPYAALSDKLDYYGKALAGHVMGASGKFEDSDEKRYGTISNPTVHIALNQVRAVVNELIRLHGKPDEVVIEIGRDLPMGADGKRELERFQKEGRAKNERARDELKKLGHIDSRESRQKFQLWEQLAKEPVDRCCPFTGKMMSISDLFSDKVEIEHLLPFSLTLDDSMANKTVCFRQANRDKGNRAPFDAFGNSPAGYDWQEILGRSQNLPYAKRWRFLPDAMKRFEADGGFLERQLNDTRYISRYTTEYISTIIPKNKIWVVTGRLTSLLRGFWGLNSILRGHNTDDGTPAKKSRDDHRHHAIDAIVVGMTSRGLLQKVSKAARRSEDLDLTRLFEGRIDPWDGFRDEVKKHIDAIIVSHRPRKKSQGALHNDTAYGIVEHAENGASTVVHRVPITSLGKQSDIEKVRDPLIKSALLNETAGLSGKSFENAVQKWCADNSIKSLRIVETVSIIPITDKEGVAYKGYKGDGNAYMDIYQDPTSSKWKGEIVSRFDANQKGFIPSWQSQFPTARLIMRLRINDLLKLQDGEIEEIYRVQRLSGSKILMAPHTEANVDARDRDKNDTFKLTSKSPGKLQSASARKVHISPTGLIREG

SEQ ID NO: 148 - protein, 1270 aa, Mycoplasma gallisepticum
MNNSIKSKPEVTIGLDLGVGSVGWAIVDNETNIIHHLGSRLFSQAKTAEDRRSFRGVRRLIRRRKYKLKRFVNLIWKYNSYFGFKNKEDILNNYQEQQKLHNTVLNLKLEALNAKIDPKALSWILHDYLKNRGHFYEDNRDFNVYPTEELANYFDEFGYYKGIIDSKNDDDDKLEEGLTKYKFSNQHWLEEVKKVLSNQTGLPEKFKEEYESLFSYVRNYSEGPGSINSVSPYGIYHLDEKEGKVVQKYNNIWDKTIGKCSIFPDEYRAPKNSPIAMIFNEINELSTIRSYSIYLTGWFINQEFKKAYLNKLLDLLIKTNSEKPIDARQFKKLREETIAESIGKETLKDVESEEKLEKDDHKWKLKGLKLNTNGKIQYNDLSSLAKFVHKLKQHLKLDFLLEDQYTPLDKINFLQSLYVYLGKHLRYSNRVDSANLKEFSDSSRLFERVLQEQKDGLFKLFEQTDKDDEKILTQTHSLSTKAMLLAITRMTNLDNDEDNQKNNDKGWNFEAIKNFDQKFIDITKTNNNLSLKQDKRYLDDQFINDAILSPGVKRILREATKVFNAILKQFSEEYDVTKVVIELARELSEEKELENTKNYKKLIKKNGDKISEGLKALGIAEDKIEEILKSPTKSYKVLLWLQQDHIDPYSQKEIAFDDILTKTEKTEIDHIIPYSISFDDSSSNKLLVLAESNQAKSNQTPYEFINSGKAEITWEVYEAYCHKFKNGDSSLLDSTQRSKKFAKMMKTDTSSKYDIGFLARNLNDTRYATIVFRDALKDYANNHLVEDKPMFKVVCINGGVTSFLRKNFDPKSWYAKKDRDKNIHHAVDASIISIFSNETKTLFNQLTKFADYKLFKNTDGSWKKIDPKTGVVSEVTDENWKQIRVRNQVSEIAKVIDKYIQDSNIERKARYSRKIENKTNISLFNDTVYSAKKVGYEDQIKRKNLKTLDIHESAEENKNSKVKKQFVYRKLVNVSLLNNDKLADLFAEKEDILMYRANPWVINLAEQIFNEYTENKKIKSQNVFEKYMLDLTKEFPEKFSEAFVKSMIRNKTAIIYNVEKDVVHRIKRLKILSSELKENKWSNVIIRSKNESGTKLSYQDTINSIALMIMRSIDPTAKKQYIRVPLNTLNLHLGDQDFDLHNIDAYLKKPKFVKYLKANEIGDEYKPWRVLTSGTLLIHKKDKKLMYISSFQNLNDLIEIKNLIETEYKENVDSDPKKKKKASQILRSLSVILNDYILLDAKYNFDILGLSKNKIDEILNSKLDLDKIAK

SEQ ID NO: 149 - protein, 1204 aa, Prevotella ruminicola
MERILGIDTGTNSLGWAIVDKDENQYHLVAKGTNIFSEGVKIEKGIESSKAAERTEHRSVRKHYWRRKIRKIRLLTILSDNDLCPRLKHEQLRQWRLKKVYPTDDTFMEWQRTEDKAQVNPYKFRYICLTQKLDLSDITQRFILGRALYHLNQRRGFLSNRKEATKESEGTVKEGISSLSKDMKDSGCEYLGEYFYQLYQQGKKIRNHYTARKEHYLKEFKAICSKQELDDALIEKLEKAIFDQRPLKSQKGQVGTCTFEKGKSRCPSSHPLYEDFRMYSFINNIKVQVDTLYDKGERSLTDEEKQLIIPLFKRKSKRTFPFEDIAKKIAGKNNYCYIKSNEEKAYKFNYQMDTQVSGSPVNAQLEEIFGEDWLSSVCEVYTLANNKSRFQIMNDVWHVLFFYDDEDKLKEFAKDRLQLDDELAEKFSKISIPNDYAALSLKAIRKIMPYLRDYGLIYSEAVFLANLVDVLPQHVWGIKEMREAAIENVIDVMHSYDKNNIDGITLEGCVKTFLKERYQVSDDNLKKLYHPSMLDPYPRQRPNDEGVFQLGSPRISSVKNPMAMHSLFRLRKVVNLMLKKGYITPDTKVHIEFSRDLNDANKRWAIQTWQRENEKERERCRKEIEKYIASPSDTDILKYQLWEEQNHKCLYTGDEIRITDFLGDNPKYDIEHTIPRSAGGDSTKMNLTLCSSRFNRDEKKTKLPAELVNHDEILERISNWKEKYEDIDKQIRKISTKGATSKEDKDSKIRRRHYLILQRDYWRGKYQRFTMTEVPEGFSRRQGTDISVISRYARMYLKSVFKQVYIVKGIATSDFRKMWGIQDEYAKKERVNHVHHCIDAITIACIGKAEYDKLADYRHQYDDYLFQGKTKPTFDKPWPSFVIDIKHIQDELLIAHYAKDNLEKFTKKNLRGKDGRIIRDKFGNKLQMKGDTSRNSLHNDKFYGAINHEGEIKYVYRTNIEALDAKSIGNIVDPTVRSIIESAIAIHGSLKAAINKGIWMNEEKHIPIKKVRVFRNDVKKPIELKDQRDLSDKDYKQHYYVTNDGNYMMLIFSKLNNKGREIRQHVVINSLEATEVIKSHKRSQVGKVVWESYYSKEGFDLIYKLKSGTMILLYENNRDEVWDLDIRNLQKRLYIITKMKYDGRIYMMHHQEAREKKDLEEKSGSFKINEDYRPLIVNSYNQFNALVQDLDFEINDLGEIRRLI

SEQ ID NO: 150 - protein, 1178 aa, Scardovia inopinata
MGKRHNSNMAKKKISYRIGIDVGLNSTGLAAIEVDDDGAPIRILNTMSVIHDGGVDPDAAKVRGTRLAISGIARRTRRMRRRRAKRLDRLEQILEKYGYTDTEPVLEEPYGPWICRAELADGFINDDEQRRMMIGIAIRHIARHRGWRNPYQNVRALLNIDDSDLSEEYKNLKEKVQDQINDGKDLPNFTPSQLVRDYLDNFSGQPAARIRTGKAGPRGNRRDAVGILPQRMRQSDYAYELQRIFDMQKIGRDEAQELLMAVFEAKSPKGSAEKRIGKDPLTGKKRALKASLAFQKYRIVATITNLRIKTGTGSERMLSPTELNDIYTYLLRVQDDNHLPTWEDICEEVLHIGRYQLAGIGKTFEGGERISNMPPVIQTSLAIHGLSEGTLAEKLTKWWDKADDDSRESMIKLLSNTVDIDRVNEVDENFASALDFIDSLDDEELTKLDKIALPRGRAAYSEEALNKLTADMLNTGDDLFSARQRIYHVNNSWRPPQPPIGEPLGNPAVDRVLKITNRYLMNCLNRWGQPRRVTIEHTRSGFTSVKQATEHQKISDKRAEYRRDIVKQLEEAGVESVHEYDIRRWEAVQRQNGQCLYCGRDITFKTCEMDHIVPRKGPGSTNTRTNFAAVCPECNRMKSNIPFASWAETKEAKDRGVSLDKAIKQVRFFNFTKNEYSPQAQRNFKKSMIERLKQKTSDEPLDNRSIESVSWMADELYKRIDWYFNHEQYETSKKAINDDKDNLSGTQVVVYPGSITAEARNAAGLGGNIHFIGGRYKTRLDRRHHAVDACVIAMMEPGIARILTERNQLRQAQRLTARIEDDEVNWKDYPTENTAGYNKYQAWSDRMHALLEYMNNALDYDKIPVVRWERLQLGNRSAHEDTIHPLKKLPLSHEISAIDINHASTPALYEALVSLPDFSEQDGLPADPSRQINVNGERYSGDDLVSFFNSNAAQIAIQGGSAELGTAFHHARIYRCWTVGKNGKKKIFFGMIRVYQHDLLHAKNEDLFTYPLKRSSVSMRYAKKEVVHAILSGNAEYVGYLCVGDELVLDLKGDKSNDEGGSRLSGQVGEFVQKFEEDSKVNSQIVNRWTVDGFPDEAKLRLRPSMFAGEGLKNMKSELVENAAIKNILSKTGWRVSVDVISKKSPVVLRRNAFGEPRWKTNAGLPVSYRWQDTETKE

SEQ ID NO: 151 - protein, 1371 aa, Gordonibacter pamelaeae
MNLRNVESYQVGLDIGTGSVGWAVLDDNGDLCRFKGKPTWGSRVFPTAETAAEARVHRGQRRRYDRRRQRIDLLQRFFADEVAKVDPEFFIRLNQARLHPENRDPAHADYRWPLFNGSNFTEKDYYRQFPTIYHLRAHLLKSDEPADIRLVYLALHNIVKHRGNFLHQDNPSLSARNANVGDAVEALCLALDEWCGAHDVECACDEAALAEALGDASLRPGEKRERAEAALGVEKAHKKLAKAVSSAVVGYAAEFGHVFFAESEGSKFALSNDEKVEAYVCPDEGRDLFDAMRAVHSSYVLMGILSEAQGELLSVCKVGEYERYKRDLETLKSLVRAYGPERYDEFFCGPFYEGTRDYDPGKAQGYTKYNLGASKLSHEDFLKEVQKLLKDIGAQADERYADIERAIEAGAFLRRLKTSDNGTIPYQLHLEEMDAIIERQAAFYPFLAQEKDKLKSLVSFRIPYYVGPLTQKNAARDGKGEARFAWSSRKPGMEDARVYPWNWEDVIDKDQSAEDFIRRMTGTCTYLKGEPVLARCSLDYELFCVLNELAGARWTQDGDKSYRFDAADRLGIVEDLFKKRKRVTYEAAEKWLARTHGPESGKSAGGAYHVSGGQGEDAFESQLSSHYDFCKILGVDELSDADEAMAEDIILWNTVFEDRSILKRKIKLAYGDRLGDAQVRKLCQKRYTGWGRLSGELLRGLRSATDNGPKTIMDILLEGDPNHARRMGAAMNLMEILHDDLLEFQAKIDEHNRERALAVGGMSVDEVTGSPALRRGINQALRVVDEIAGIAGKPPAHIYVEVTRDEGARNKGRRTTSRYRALEAALSSIKAQCADVYAELKERDPRALDDERLTLYFMQCGKCMYSGDALDINKLQTYQVDHILPQSYVKDDSFENKVLVRPDTNQRKGDTLLLDERLIARMRGFWRTLRDAELIGEKKFNNLTRTSVSDEQMKKFVSRQLVETGQMVKQVQQLLQARYPESEVQPVKAGVSHQLRVGCALAKSREINDFHHAHDAYLACQVGRFVQYRHSAVYSEPVKMAAVVKQFIKKQAEDYRRTRELPGSDGFIVSSFMTPGFDVKTGEVFRDAWDAGAEIDRIRRCFDYKDCFISRMPEETHGAFWDATIYSPRAAGKTLSLPLKRGLDPRKYGSYSREQFAYFFVYEAVKPKKKQRVLEFAPVPVRVASALANDPDALEDYARELAEAEGLVFERIRRRKVYKYQQIIVGDSRLYVTGREEVRNARQLAFSQDETKLICRIEQGEECEEGELLDLFRSMQRKYLACAPRLARLMKVAEMEEGFIAATASGKREVLLSLTSIAAAHRNSIDLKPIGRKGSSGQMKITFSKELSTNGILFVDSSVTGMFERRCRLGL

SEQ ID NO: 152 - protein, 1388 aa, Zunongwangia profunda
MKRILGLDLGTNSIGWALVNEAENEKEISKIIKLGVRVNPLTIDEKTNFEKGRPLSTNADRTLKRGARRNLQRYKLRRENLIEILIDNHIITKETPLTEIGKGTTYQTLSLRAKAVRERIDLEDFAKVLLAINKKRGYKSSRKASNDEEGQAIDGMAIAKELYERGITPGQYVLELLENDRKYIPDFYRSDLKQEFNKIWNNQKTFYPEILTDELFKELDGKNKSQTWAICQKPFNIKGIKRITKGREKTIENYHWRVKGLSGKLNLEKLAIILQEINNDINQSSGYLGGISDKSKKLYLNKETVGEFLYKQIAKNPHTSLKNQVFYRHDYLDEFEQIWKTQSNFNANLTDELKQEIRDVIIFYQRKIKSQKSLISFCQFESWEQEYFDKETGKTKTRTVGRRVIPKSSPLFQEFKIWQNLNHLVFTNSETDEKIEIKEVEQEIRKELFEELNLRGDLNPNDLLKILRSQFKIGKLSNWKCNFEKIEGNRTNAALFNIYQKISDFEGYGIDWNKSNAKKIRKELKATFPEIGIDASILEFDAYKKQLTNQSSYELWHLLYSAEEDFKISEQDKLIYGNSSVSLKKKLHLKFGFNPEYAKMLANLSLMSDYGNLSAKAIKKILPYLEDGHLYSEACRLAGYNHSKSLTAEELEKFEPKAKLDLLKKNSLRNPVVEKILNQMVNVVNQVIDTYGKPDGVRIELARELKKSAKERAEMTKGIADGTRRNEEIKKIITQKFGIPNPTKSDLVRYRLWQELESRGYKDIFTDKYISPDKIFSSEIDIEHIIPKALLFDDSFSNKTLSFRNVNLKKANRTALDFITQDYQSNVEAYKERVETWNKDNHISKGKRNKLLMSLKDIPDGFIERDLRNSQYIARKAKRMLYEVFPNEVLATSGSITDKLRSDWDLINVMKELNLPKYKALGLTEYEERLDKGTEELFKHEVIKDWTKRNDHRHHAMDALAVAFTTHNHIQYINNLNARKDITQDNHPIIKNIENLITEVNSKGKRVFKAPMSSFRESAKEQIEAILVSFKNKNKVVTKNINQTKKEGGFNYQNAKTPRGQLHKETIYGKSKQPLEKPVKINNRFCKKQVGLIINFKEQEAVLHHLKKYDNNEKIAFSNKTLKSDPIQVNGSPLREVKIFEEIFTIRKDINPDNFKTQKHLDKIIDKGIKEVMKKRLEEYNGDFKTAFSDLDKNPIWLNQSKGITIKRATISGVTNAEPLHQAKDHLGNIILDDNGKEIPIDYVSTGNNHHVAIYQDESGNLQEEVVSFYEAVIRKNQDQPIIKKRHPKGWKFLFTMKQNEMFVFSSENFNPSEIDLLDEKNAAIISPNLFRVQKIATKNYMFRHHLETEVTNNLDFTYRHFQATEWLRNLCKVRIDHIGRIVQIGEY

SEQ ID NO: 153 - protein, 1082 aa, Methylosinus trichosporium
MRVLGLDAGIASLGWALIEIEESNRGELSQGTIIGAGTWMFDAPEEKTQAGAKLKSEQRRTFRGQRRVVRRRRQRMNEVRRILHSHGLLPSSDRDALKQPGLDPWRIRAEALDRLLGPVELAVALGHIARHRGFKSNSKGAKTNDPADDTSKMKRAVNETREKLARFGSAAKMLVEDESFVLRQTPTKNGASEIVRRFRNREGDYSRSLLRDDLAAEMRALFTAQARFQSAIATADLQTAFTKAAFFQRPLQDSEKLVGPCPFEVDEKRAPKRGYSFELFRFLSRLNHVTLRDGKQERTLTRDELALAAADFGAAAKVSFTALRKKLKLPETTVFVGVKADEESKLDVVARSGKAAEGTARLRSVIVDALGELAWGALLCSPEKLDKIAEVISFRSDIGRISEGLAQAGCNAPLVDALTAAASDGRFDPFTGAGHISSKAARNILSGLRQGMTYDKACCAADYDHTASRERGAFDVGGHGREALKRILQEERISRELVGSPTARKALIESIKQVKAIVERYGVPDRIHVELARDVGKSIEEREEITRGIEKRNRQKDKLRGLFEKEVGRPPQDGARGKEELLRFELWSEQMGRCLYTDDYISPSQLVATDDAVQVDHILPWSRFADDSYANKTLCMAKANQDKKGRTPYEWFKAEKTDTEWDAFIVRVEALADMKGFKKRNYKLRNAEEAAAKFRNRNLNDTRWACRLLAEALKQLYPKGEKDKDGKERRRVFSRPGALTDRLRRAWGLQWMKKSTKGDRIPDDRHHALDAIVIAATTESLLQRATREVQEIEDKGLHYDLVKNVTPPWPGFREQAVEAVEKVFVARAERRRARGKAHDATIRHIAVREGEQRVYERRKVAELKLADLDRVKDAERNARLIEKLRNWIEAGSPKDDPPLSPKGDPIFKVRLVTKSKVNIALDTGNPKRPGTVDRGEMARVDVFRKASKKGKYEYYLVPIYPHDIATMKTPPIRAVQAYKPEDEWPEMDSSYEFCWSLVPMTYLQVISSKGEIFEGYYRGMNRSVGAIQLSAHSNSSDVVQGIGARTLTEFKKFNVDRFGRKHEVERELRTWRGETWRGKAYI

SEQ ID NO: 154 - protein, 1186 aa, Gardnerella vaginalis
MEGNISYAIGIDVGLNSVGLAAIRLDNNGEPIRILKAMSVIHDAGIDPNGAKESDTRKAISGVARRVRRLYRQRRRRLQKLDFLLHSLGFPVVENKDLDFSDSFTPWIFRAKLADEYIADEKQRKQMLSVAIRHIARHRGWRNPYQSIKSMTQETEYSEFYNELLKNIEKFAPGVSCEGSTPAQLVRDYLLSQQGKASRRLRITTDDRRKNHPNSLDPVLPRKLMQSDNMLEILNIFNVQHIDNKYVREQIINAVFYAKSPRGSAENRVGKDAITGKGKRALKASLAFQKYRIISTISNLRIRENSKERCLTIEEKQSVYKLLTTSTDEYSKEKSAEAPLYTWIDVADCLGIERYKLRGVGSQIEDGESVGNRPPMLNSELAILYANAKSLKQSLITWWLAANRTQEDKEAFIEILSNTVDIEAIHDNPEYQDKYGSVIAFIDSMDETEIAALENISLPNGRAAYSLETLDKLNKQMLETDDDLFEARKKLFNLPNNWRPSEAPIAEPTGNPSVDRVLKIVHRFLISAKNRWGNPERINIEHVRSGFQSKKMANSYKKLLDKRTEGKENLKAMMRNSLHLGTSDSISDADIRRYEAVQRQNGQCLYCGSEITYHTCELDHIVPRKGPGSTNTRENLVATCSSCNAQKCNTPFATWCEESTYCKNHDISVDSAINRVRAFIFPPNSYDKRGASQFKKEVIARLKQKVGDEAFDNRSIESVAWMANELHRRIDWYYNSQNYQTNNGISDITNKAQTNVGVYAGSLTAIARRMSGIDGKLEFFDGRRKTRFDRRHHAVDASVIAMMTPGIAQILAIKCNLRETQLLQGNKVVPGGIDWKEYPTANDQGYQQYANWSVRMNALLELLNEEMRADRIAVVNSIRLRYSNSSVHKDDVHALLKLHVGDEIDSETIRRASTPALYCALTRNPDYDVNNGLPENTDRTILLHDKKLNADDSITFFKSKAAQLFVREGSVEIGNSIHHLRIYEYFEKLKSGKVKKSYGMIRVFQDDLHRYIHEDLFSCDLPEQSISMRYADTKVAHAVQTGNANYLGYLVPGDEIIVDFSHVKLSGYIGEFVEFLNKIGANCAAYKHWVVAGTDDKTTLILKPSMISSEGIDKLYSNCERNNFDYASYEKSIDKILVDKGWRVSVNVLDQYKAATIRRNALGEPRWASRSHLPISWSWDTGENRE

SEQ ID NO: 155 - protein, 1434 aa, Bacteroidetes oral
MKNILGLDLGTNSIGWAYVKQAQNDSEKSEIAELGVRVNPLTVDEKTNFEKGKPISTNADRTLKRGARRNLQRYKLRRQELIELLKDYQVISDKTILAEDGKETTFETLRLRVKSAKEQVSLEELARILLMINKKRGYKSSRKAKNEDEGQLIDGMEIARRLYDENLTTGQLSLQLLKEGKKSLPDYYRSDLQHELDKVWNFQKQFHPDILTDEFYTSIQGKGQKATRESFSSKYGIDTAENKGSREEKKLQAYQWRADATHKELTKEELAFVITEINNNINNSSGYLGAISDRSKELIFANETVGEYLWKQIQNDPHTSLKNQVFYRQDYFDEFERIWETQSGFYPQILTESLKNELRDILIFYQRKLKSQKALVSICEFESKEIPLKDKQGNPISKNGIPVTKLVGPKVAPKSSPLFQEFKIWQNLNNVLVRPKGSRKRKVTTNQQSTLLEGQEPVFELNLEQKELLFEELNLKGNLKTDYCLELIGYSAKEWEMNYPTLEGNKTNKALYEAYLKIIDSEGYDAKKLLKVKTDKDDINLDDIKVSASEIKTMISDIFNELGINTKILDFDAELERKQFEAQASYRLWHLLYSYEGDDSKSGNELLYRLLEDKFGFKREHSKTLANVSLLSDYGNLSTKAIRTIYPYIKENKFSTACELAGYRHSKLSISKEENENRTLKDTLDVLKKNSLRQPVVEKILNQMINLINELIEKHSEKDEKGNIVKYFKFDEIHIELARELKKNAEERRELDSKVREGKDRNEKIITILKSEFGLPYPTKNDITRYRLYEELKDNGYKDLYTNTYIPREKLFSKEIDIEHIIPKSRLFNDSFSNKTICYRQDNLNKGERTAYDYIEGLGKTQLDEYLNRVENLYTNKFITKAKYRNLLKKESEIGDGFIERDLRETQYIAKKAKEMLLQITRHVVSTTGSITDRLRDDWELVNVMRELNLPKYKVLGLTEIQERKNGQTVEVITDWTKRNDHRHHAMDALTVAFTKHSHIQYLNFLNARKDEKHKEYSNIMGIQQLETEKTTDKDGKDRRVFKTPIPNFRQVAKEHLESILISHKTKNKVVTRATNKIAGSKKQQETLSPRGQLHKETVYGKYRRYVQKEEKIGSKFDLQTIERVANPLYKRLLTKRLEENGGDPKKAFTGKNALAKSPIYLDETQTQQLPEKVKLVWLETDFSIRKDITPDNFKDEKSIDKVLDEGIKRILKDRLKSFDGDAKRAFTDLEQNPIWLNKEKGIAIKRVTISGVSNAEPLHTKKDHLGNEIFDDTGKPIPVDYVSTGNNHHIAIYRDENGNLQEKAVSFFEAVTRANQGLPTVDKTYNQHLGWQFLFTMKQNEMFVFPNKETGFDPQEIDLLDPKNKKLISPNLFRVQKISTKNYFFRHHLETSVETHNALNGVTYKSQLGLNGITDIIKVRINHLGDIVHIGEY

SEQ ID NO: 156 - protein, 1341 aa, Peptoniphilus sp.
MWGSRLFEEASTAQDRREHRSNRRRLERRKYRLDLLEELFVEEINKIDPEFFIRLRESKFHFEDRSLKNTFILFNDKMEGGYNDKVFFSKYPTIYHLRSALINGNKEDVRAVFLAIHNILKNRGHFLLAGNDINISLSLNDTLTDLFEYLKIHLGIEVEFENKLKDIEKIALDKNLSKSDKQKKIVQLLETDYKKQLADVFKLSLGLTANMENIFGKENEQGLEFINAENKIKKIQFDSSYEENIAEFDQFYGEYFEIIDICKKIYDAISLSQILVDGKGLSESKVLSYEKHKEDLKLLKKVLKNIDKAYDNKGEDRLVYKVLKEDKDKGTNYVNYSKLSNNGTATTKEEFYKFLSKNLDLKKFGKLNKEDIETLDYINSEILLGRFLPLQKEKINGVIPYQLQMKELTQILNNASKYLPFLNKIEDGMTVKDKIISLIKFRIPYYVGPLNEYNRIENGNGFAWIEKKKNEKIFPWNFNDVVDIEKSAEKFINNLTNKCTYIKEETVLPKNSIIYSKFMVLNELNNLQYGNKKLDIELKMKMYTDLFLEKKDNRKVTEKRILEYFRINGINDGKEKLTGLNNEIHADMKSYRDMCEIMGENFNINVAENIINWITVFHGEKKILINKIKNVYGKMFNDEQISKLSKLNYSDWGRLSKKLLTDIKCYIDADGINFPVSILEAMEVSNKNLMELLSNKYEFISCIDDINNKYFGDRDISASELIDELYVSPAVKRGIWQSVRILEEIVSIIGHNPKKIFIEMTRHNEEKVQKSSRRHNLEELYKAIRKDPEYVELIKEFDSTTDTDSFKIKKLYLYFMQLGKCAYSKEKIDFDKLFTDSYDIDHIYPRSKTKDDSIHNNLVLVKAKYNREKTDVYPIDINIQKNMNSFWNFLYTKKFITEEKYKRLIRTSDLTDEELAKFISRQLVETSQSTKATAEVLKQIYGDSDICYVKAENVSDFRYGSSRQKDKNDIQKLFVKCREVNHFHHAKDAYLNIVVGNVYDVKFTKNPVNFIKKNKMGNKSNYSLNHMFCFDVERNGYKAWDSSETIKTVGRMMKSNDVRITKHVHPTRGELYDATIYKAKIAKTGSYMPLKSSKNTPLSDVTKYGGYTKIKIAYYSVYKYKFSDKNLIKTEIRLIPIPIYLSKNDDDIKEYVKNYLNDRVNSKLIDFTKIYDKLYVNSLIKINGYLYYLGGKTNDRVWIDNAVSIVLDDKIEYLIKRISNDIKYGYEINVSDDELMDIYESLAEKANKKIFYNRLSDFEKIFSNMDVKKKFVKLEKNDKCRVLLQLLNVLTDSQTTYKLEMVGLKHSRSNIGMKISNLEEFKVINSSITGLYSNEIDILNI

SEQ ID NO: 157 - protein, 1391 aa, Lactobacillus gasseri
MTKIKNEYIVGLDVGTNSCGWVAMDFQNTILRMHGKTAIGSHLFDAGNSAADRRAFRTTRRRIKRRKWRLKLLEEIFDPYMTEVDPYFFARLKESGLSPLDKRKNVSSIVFPTALEDKKFYCNYPTIYHLRYDLMSEDKKFDLREIYLAIHHIVKYRGNFLYNTPVKDFEASKIDVKDSLEKLNELYERLDSEFTVELDSSNALEIEKIIRDKKVFKINKVKSIHQLLSLKTENKERTKLIKDVSKQIINAILGYKTKFETILLKNISKDEADDWEFKLTDVDADNKFENLIGDLNENEQEILLEIRNLANAITLSNIVEEGKTLSESMIDKYNKHSDDLELLKQVISDHPDRDKAKKLALAYDLYVNNRHGKLLQAKDVLGSKKTLSKEDFYKEVKKNLDDSKASQEILDTIALDSFMPKQRTNENGVIPYQLHQLELDRIIKNQGKYYPFLKEVNPVSSHLKEAPYKLDELIRFRVPYYVGPLISPNESTKNKQTKKNQNFAWMIRKEQGQITPWNFDQKVDRMASANKFIKRMTTKDTYLLGEDVLPANSLLYQKFTVLNELNNIKINGKRISVPLKEELYNNLFKKNSTVTTNKLKSYLKENYNLINVEIKGLADEKKFNSGLTTYNKLRNLKIFDQQLDDLNYDKDFERIIEWSTIFEDKAIYKDKLKTIKWLSDRQIDKLSKIRMQGWGQLSKKLLSQLTDNNGQTIIEQLWDSQNNFMQIVNQSDFKDAIAVANQNLLVNTSVEDILNEAYTSPANKKAIRQVVKVVDDIVKAASGKVPKQIAIEFTRDADDKAKISQTRANKLRKVYKELSNELASETIRNELERVAKDQKLLKDKYYLYFMQLGRDAYTGEPINIDDLGQYDIDHILPQSFIKDDSLENRVLVKKAVNNGKSDNVPVKLYGNRMAADLGMTIRHMWEKWKDQGLITKTKYNNLIIDPDKINKYESSGFIHRQLVETSQIIKLVSTILQSKYPDTEIIVVKARYNHYLRKHLNLYKSREVNDYHHAIDAYLSAICGNLLYQVYPYLRPFFVYGQYKKFSSDPKKEKIIYDKTRKYNFISQIFENKSNDIISLETKKKVFDKKDIIEKLKHAYNYKYMLVSRETETHDQEMFKMTVYPRLSRDTKKSRNLISKKKDMPTEIYGGYTNNSDAYMVIARINKKKGTEYRVFGVPMRELVNLRKAEKNGRYNAYLKQVLEPEIMYSKNGKKNKTISSFEIVKAKVPYKQVILDGDKKFMLASSTYVQNAKQLTLSQNSMQAITDNCENDTEEEKALEEKALIEAYDEILTNIDKYLPLFDINKFREKLHAGREKFINLSLDVKKDTILQVLNGLHDNAVMPKIKSLGLSTPLGFMQFSSGVPLSENAKLIYQSPTGLFEKRVKISDL

SEQ ID NO: 158 - protein, 1426 aa, Sphingobacterium spiritivorum
MKHILGLDLGTNSIGWALIKQDFENKQGEILGMGSRIIPMSQDILGDFGKGNSVSQTAERTKYRSVRRLRERFLLRRERLHRILNVLGFLPEHYASQIDFTKRFGKFKEETEPKLVYSNEGFIFKKSFEEMLSDFKTHQPQLLEDNKKIPYDWTIYYLRKKALSRKIEKEELAWILLNFNQKRGYYQLRGEEEEENPNKLIEFYSLKIVDVLADEPQKGKSDIWYSLILENGWIYRRSSKTPLFDWKEKTRDFIVTIDLNDDGSVKTDKEGNEKRSFRAPGENDWTLVKKKTEQEIDSSRKTVGTYIYETLLKNPKQKIKGKLVRTIERKFYKTELKQILEKQKEFHPELRQDDLYSDCVRELYKNNEAHQLTLSKKDFVHLFMEDIIFYQRPLGSQKSSISNCTLEFRKYKDENGTEHTQYLKAIPKSNPYYQEFRIWQWMYNLNIYKKEDDTNVTKDFLNTKADFESLFEFLNNRKEVDQKALLKHFKLNDKTHRWNYVEDKKYPCNETKTMILSRLDKVENISDDFLTREMEQKIWHIIYSVNDKVEYEKALKSFAGKNNLEDNSFFEAFKKFPPFKSEYGAFSEKAIKKLLPLMRMGKFWNYNNISEQSKSRIQKIITGEYDENIKDKVREKAIHLTTETDFQGLQLWLVQYIVYGRHSEAAMLGKWNSADDLEEFLKEFKQHSLRNPIVEQVITETLRVVKDIWQKYGNGAKDFFREIHIELGREMKLPAEERERLTRQISENENTNFRIKALLAEMMDDNSVENVRPFSPMQQEILKIYEEGVLNSDIEIEDDILKISKTAQPSSSDLKRYKLWLEQKYKSPYTGQIIPLNKLFTPEYEIEHIIPQSRYFDDSFTNKIICESAVNKLKDNYIGLEFIKKLGGSIVECGNGKSVAILKHDAYEDFIKKHYANNRSKRNKLLLEDIPEKMIERQMNDTRYISKYISGVLSNIVRVEDGTDEGVNSKNIVPGNGKITTQLKQDWGLNDVWNDLILPRFERMNHLTNSTDFTAWNENHQKFLPTVPVEFSKGFSKKRIDHRHHALDALVIACATKDHVNLLNNQSAKSDTKRYDLKKKLMKFEKVAYNHPQTGERIEREAPKQFLKPWETFTIDAKNHLETIIVSFKQNLRVINKATNYYEKYVEKEGTKVKERVEQKGTNWAIRKPMHKETVSGKIDLPRIKVPKGKILTATRKSLDTSFNLKTIGSITDTGIQKILKNYLQYKDNNPELAFSPEGIEDMNKNIEKFNNGKAHQSISKVRVFELGSKFPLGQSGNKKEKYVEAAKGTNLFFAIYQDKNGKRSYETIPLNEVIERQKQGLSVVDLKGVDDFYLSPNDLVYVPSEDELENISMIDFNKMSSERIYKVVSFTGNQIFFVRQDIATSVVNKAEFSTLNKMERAIDGTMIKETCVKLQIDRLGNISKI

SEQ ID NO: 159 - protein, 1361 aa, Lactobacillus casei; identical to SEQ ID NO: 75

SEQ ID NO: 160 - protein, 1436 aa, Bacteroides fragilis
MKRILGLDLGTNSIGWALVNEAENKDERSSIVKLGVRVNPLTVDELTNFEKGKSITTNADRTLKRGMRRNLQRYKLRRETLTEVLKEHKLITEDTILSENGNRTTFETYRLRAKAVTEEISLEEFARVLLMINKKRGYKSSRKAKGVEEGTLIDGMDIARELYNNNLTPGELCLQLLDAGKKFLPDFYRSDLQNELDRIWEKQKEYYPEILTDVLKEELRGKKRDAVWAICAKYFVWKENYTEWNKEKGKTEQQEREHKLEGIYSKRKRDEAKRENLQWRVNGLKEKLSLEQLVIVFQEMNTQINNSSGYLGAISDRSKELYFNKQTVGQYQMEMLDKNPNASLRNMVFYRQDYLDEFNMLWEKQAVYHKELTEELKKEIRDIIIFYQRRLKSQKGLIGFCEFESRQIEVDIDGKKKIKTVGNRVISRSSPLFQEFKIWQILNNIEVTVVGKKRKRRKLKENYSALFEELNDAEQLELNGSRRLCQEEKELLAQELFIRDKMTKSEVLKLLFDNPQELDLNFKTIDGNKTGYALFQAYSKMIEMSGHEPVDFKKPVEKVVEYIKAVFDLLNWNTDILGFNSNEELDNQSYYKLWHLLYSFEGDNTPTGNGRLIQKMTELYGFEKEYATILANVSFQDDYGSLSAKAIHKILPHLKEGNRYDVACVYAGYRHSESSLTREEIANKVLKDRLMLLPKNSLHNPVVEKILNQMVNVINVIIDIYGKPDEIRVELARELKKNAKEREELTKSIAQTTKAHEEYKTLLQTEFGLTNVSRTDILRYKLYKELESCGYKTLYSNTYISREKLFSKEFDIEHIIPQARLFDDSFSNKTLEARSVNIEKGNKTAYDFVKEKFGESGADNSLEHYLNNIEDLFKSGKISKTKYNKLKMAEQDIPDGFIERDLRNTQYIAKKALSMLNEISHRVVATSGSVTDKLREDWQLIDVMKELNWEKYKALGLVEYFEDRDGRQIGRIKDWTKRNDHRHHAMDALTVAFTKDVFIQYFNNKNASLDPNANEHAIKNKYFQNGRAIAPMPLREFRAEAKKHLENTLISIKAKNKVITGNINKTRKKGGVNKNMQQTPRGQLHLETIYGSGKQYLTKEEKVNASFDMRKIGTVSKLAYRDALLKRLYENDNDPKKAFAGKNSLDKQPIWLDKEQMRKVPEKVKIVTLEAIYTIRKEISPDLKVDKVIDVGVRKILIDRLNEYGNDAKKAFSNLDENPIWLNKEKGISIKRVTISGISNAQSLHVKKDKDGKPILDENGRNIPVDFVNTGNNHHVAVYYRPVIDKRGQLVVDEAGNPKYELEEVVVSFFEAVTRANLGQPIIDKDYKTTEGWQFLFSMKQNEYFVFPNEKTGFNPKEIDLLDVENYGLISPNLFRVQKFSLKNYVFRHHLETTIKDTSSILRGITWIDFRSSKGLDTIVKVRVNHIGQIVSVGEY

SEQ ID NO: 161 - protein, 1517 aa, Bacteroides sp.
MKKIVGLDLGTNSIGWALINAYINKEHLYGIEACGSRIIPMDAAILGNFDKGNSISQTADRTSYRGIRRLRERHLLRRERLHRILDLLGFLPKHYSDSLNRYGKFLNDIECKLPWVKDETGSYKFIFQESFKEMLANFTEHHPILIANNKKVPYDWTIYYLRKKALTQKISKEELAWILLNFNQKRGYYQLRGEEEETPNKLVEYYSLKVEKVEDSGERKGKDTWYNVHLENGMIYRRTSNIPLDWEGKTKEFIVTTDLEADGSPKKDKEGNIKRSFRAPKDDDWTLIKKKTEADIDKIKMTVGAYIYDTLLQKPDQKIRGKLVRTIERKYYKNELYQILKTQSEFHEELRDKQLYIACLNELYPNNEPRRNSISTRDFCHLFIEDIIFYQRPLKSKKSLIDNCPYEENRYIDKESGEIKHASIKCIAKSHPLYQEFRLWQFIVNLRIYRKETDVDVTQELLPTEADYVTLFEWLNEKKEIDQKAFFKYPPFGFKKTTSNYRWNYVEDKPYPCNETHAQIIARLGKAHIPKAFLSKEKEETLWHILYSIEDKQEIEKALHSFANKNNLSEEFIEQFKNFPPFKKEYGSYSAKAIKKLLPLMRMGKYWSIENIDNGTRIRINKIIDGEYDENIRERVRQKAINLTDITHFRALPLWLACYLVYDRHSEVKDIVKWKTPKDIDLYLKSFKQHSLRNPIVEQVITETLRTVRDIWQQVGHIDEIHIELGREMKNPADKRARMSQQMIKNENTNLRIKALLTEFLNPEFGIENVRPYSPSQQDLLRIYEEGVLNSILELPEDIGIILGKFNQTDTLKRPTRSEILRYKLWLEQKYRSPYTGEMIPLSKLFTPAYEIEHIIPQSRYFDDSLSNKVICESEINKLKDRSLGYEFIKNHHGEKVELAFDKPVEVLSVEAYEKLVHESYSHNRSKMKKLLMEDIPDQFIERQLNDSRYISKVVKSLLSNIVREENEQEAISKNVIPCTGGITDRLKKDWGINDVWNKIVLPRFIRLNELTESTRFTSINTNNTMIPSMPLELQKGFNKKRIDHRHHAMDAIIIACANRNIVNYLNNVSASKNTKITRRDLQTLLCHKDKTDNNGNYKWVIDKPWETFTQDTLTALQKITVSFKQNLRVINKTTNHYQHYENGKKIVSNQSKGDSWAIRKSMHKETVHGEVNLRMIKTVSFNEALKKPQAIVEMDLKKKILAMLELGYDTKRIKNYFEENKDTWQDINPSKIKVYYFTKETKDRYFAVRKPIDTSFDKKKIKESITDTGIQQIMLRHLETKDNDPTLAFSPDGIDEMNRNILILNKGKKHQPIYKVRVYEKAEKFTVGQKGNKRTKFVEAAKGTNLFFAIYETEEIDKDTKKVIRKRSYSTIPLNVVIERQKQGLSSAPEDENGNLPKYILSPNDLVYVPTQEEINKGEVVMPIDRDRIYKMVDSSGITANFIPASTANLIFALPKATAEIYCNGENCIQNEYGIGSPQSKNQKAITGEMVKEICFPIKVDRLGNIIQVGSCILTN

SEQ ID NO: 162 - protein, 1399 aa, Olsenella uli
MNLRNTTDEYNIGLDMGTNSVGWAVTDKAGAIAHFKGKPTLGSRLFDAAQTAAGARIHRSQRRRYVRRRWRLDLLQSLFQDEVSKVDSEFFCRLRQSRLYVGDREKGHADYTWPIFNDSDFNEVDYYKRFPTIYHLRKWLMETDEKADIRLIYLATHNIVKHRGNFLRENNKSLSSRDANPAQAVKSLRLALNDWCSERDYECAWKGEEDDGAIDEAILNVLADGEKGRSDQAKEIAKLTGVDCGDAKQSKQCNEAIAKAIVGLKVEMKNIFGEFPAEKTSYIYLSSDEDVEAVRESCPDDSGELFQALCKLYSAYILQELLSYADPSGQTISANMVAKYKQYGRDLRLLKELTRTYAPQKYDLFFRGETYAGSSDYVVDEARGYTRYNLGTTKANYDDFQKSVKELFKGTDALQDERYQEMMVAFGEQKFLRRLKTSDNGSIYYQLHLEELHTILENQGKHYPFLLSEEDKIESLVSFRIPYYVGPLTRKNAAIGHDGKERFAWSSRKDGMEHAVITPWNWEEIIDRDKSAEDFIMRMTGDCTYLQGEPVLPKCSLLYEEFCALNEFNGAHWTVDGDDERRFDAAQRERIMCDLFRRTRSVTYNKVSDWLERKYNFTGARVRGGQGEHGFESKLGSYIFFCKDVFKTDGLDEADYTMIEQIILWSTLFEDRDILKRKIEEAYGGDRLTSEQIKVICKKRFTGWGRLSKRLLTDIKVNTDTGRKSIMDVLREGNPNNGQRSRTMVFMEVLRDEDLGFQKAIDGLNRDYFREHNNGLMDVNDLPGSPAIRRSINQAVRIVDEIASIARKEPTNIFIEVTREEDDPRKKGKRTKRRYDAIKSALEKFKKDDPSLWKELCEKAPGDMDERLSLYFMQRGKCMYSGRPIKIEELHTGKYEVDHIIPRSYIKDDSFENKVLVYREENQHKTDALLIDSSIRQKMGGYWRMLHDAKLVGDKKFRNLFRNHIDDKAMKGFVARQIVETSQMVKLVQTLFEARYPNTRIVPVKAGISHDLREAAGLVKCREANDFHHAHDAFLACRIGLFIQKRHPSVYDNPIGLARIMRDYARMQAREYKKSHCLAHTQGFIVNSFLSSGFDEETGEIFKDDWDAKAEVEGIRRVLNCRQCFISRMPVEGDTRYGGRYWGETIYSPKGKHKHEIPLKQGLDPNLYGGYSDLLYSYFLIYEASDVSSGERVLRFIGIPTSIAARMANQKRLEEYVSRLALQENLEHVRMVRKIMKKQLIEVDNCRLLVTAADAVTNATELAFSLDEMKIISTCAKCINGADPSAIDKIGNAQDSFFDNLKRRGSDRCALLFSQLKLDKLSQNFYMISSDDKSKILISILDRIRAKSNSVDLSLVGGAKHAAQMKFDFNAKLNNPASSFVLIDQSVTGMFERRTRIGL

SEQ ID NO: 163 - protein, 1398 aa, Veillonella atypica
METQTSNQLITSHLKDYPKQDYFVGLDIGTNSVGWAVTNTSYELLKFHSHKMWGSRLFEEGESAVTRRGFRSMRRRLERRKLRLKLLEELFADAMAQVDSTFFIRLHESKYHYEDKTTGHSSKHILFIDEDYTDQDYFTEYPTIYHLRKDLMENGTDDIRKLFLAVHHILKYRGNFLYEGATFNSNAFTFEDVLKQALVNITFNCFDTNSAISSISNILMESGKTKSDKAKAIERLVDTYTVFDEVNTPDKPQKEQVKEDKKTLKAFANLVLGLSANLIDLFGSVEDIDDDLKKLQIVGDTYDEKRDELAKVWGDEIHIIDDCKSVYDAIILMSIKEPGLTISQSKVKAFDKHKEDLVILKSLLKLDRNVYNEMFKSDKKGLHNYVHYIKQGRTEETSCSREDFYKYTKKIVEGLADSKDKEYILNEIELQTLLPLQRIKDNGVIPYQLHLEELKVILDKCGPKFPFLHTVSDGFSVTEKLIKMLEFRIPYYVGPLNTHHNIDNGGFSWAVRKQAGRVTPWNFEEKIDREKSAAAFIKNLTNKCTYLFGEDVLPKSSLLYSEFMLLNELNNVRIDGKALAQGVKQHLIDSIFKQDHKKMTKNRIELFLKDNNYITKKHKPEITGLDGEIKNDLTSYRDMVRILGNNFDVSMAEDIITDITIFGESKKMLRQTLRNKFGSQLNDETIKKLSKLRYRDWGRLSKKLLKGIDGCDKAGNGAPKTIIELMRNDSYNLMEILGDKFSFMECIEEENAKLAQGQVVNPHDIIDELALSPAVKRAVWQALRIVDEVAHIKKALPSRIFVEVARTNKSEKKKKDSRQKRLSDLYSAIKKDDVLQSGLQDKEFGALKSGLANYDDAALRSKKLYLYYTQMGRCAYTGNIIDLNQLNTDNYDIDHIYPRSLTKDDSFDNLVLCERTANAKKSDIYPIDNRIQTKQKPFWAFLKHQGLISERKYERLTRIAPLTADDLSGFIARQLVETNQSVKATTTLLRRLYPDIDVVFVKAENVSDFRHNNNFIKVRSLNHHHHAKDAYLNIVVGNVYHEKFTRNFRLFFKKNGANRTYNLAKMFNYDVICTNAQDGKAWDVKTSMNTVKKMMASNDVRVTRRLLEQSGALADATIYKASVAAKAKDGAYIGMKTKYSVFADVTKYGGMTKIKNAYSIIVQYTGKKGEEIKEIVPLPIYLINRNATDIELIDYVKSVIPKAKDISIKYRKLCINQLVKVNGFYYYLGGKTNDKIYIDNAIELVVPHDIATYIKLLDKYDLLRKENKTLKASSITTSIYNINTSTVVSLSNKVGIDVFDYFMSKLRTPLYMKMKGNKVDELSSTGRSKFIKMTLEEQSIYLLEVLNLLTNSKTTFDVKPLGITGSRSTIGVKIHNLDEFKIINESITGLYSNEVTIV

SEQ ID NO: 164 - protein, 795 aa, Prevotella disiens
MEKQRILGLDPGTNSLGWAVLDFDNSKQEYNLVRKGEVIFEEGVGKSKRGEFSKAAYRTFYKSTRKHYFRRRLRKIEVLKVLVKYDFCPYLSDDLLKQWHEKKIYPAVKEFMDWQRTSDAEGKNPYYDRHCCLNEKLDLSLKSDRYVLGRALYHLTQRRGFKSNRLIQNNDENEEGKVKKGISELSTEMQEANCNYLGDYFYKLYTEKGNTVQIRKRYTDREKHYKNEFNAICEKQELNETIVKELDKAIFFQRKLKPQRHGVGKCTFEPNNRRCAISHPDFERFRMLCFINNIKIKTPFEENLRPLNNEEKALIEPLFYRKSIKNFDFEEIAKKLAGKNNYCYIKDDSSKQYKFNYRMSQGASTCQTIAKLKSIFGEEWKNGIAETYTNRRKKEGLKKQAEMVDDIWNVLYSVSECDVLKDFAINKLQLDEKTADNFSKTKLAQGFATLSLKAIRKILPFLEQGFGYTEAVFLANIPTVVGKEYWNNEDIRNDIMEEIKTIFYHNTLKTNDSHNTILFCIKDILSNNFDLAPGAIDKLYHPSMINVYKDVIPNEDGILQLGSPKIDAVKNPMAMRSLHIIRKVVNELLREGIINSDTEVRIEYARELNDANKRHAIADWQKKQYGKHQKYRKEIKELFKAETGFEIEPNETDILKFELWEEQNHICLYTGQEIGISEFVGENPKYDIEHTIPRSLGGDSTKMNMTLCENKFNRENKQKKLPSELANHSEILERIDDWKKKIYILQKKYDSIRTHNGMDKENKDKKIVSMQVRISGSSICVYSQNTLLWLQYGYN

SEQ ID NO: 165 - protein, 1428 aa, Burkholderiales bacterium
MGKTHIIGVGLDLGGTYTGTFITSHPSDEAEHRDHSSAFTVVNSEKLSFSSKSRTAVRHRVRSYKGFDLRRRLLLLVAEYQLLQKKQTLAPEERENLRIALSGYLKRKGYARTEAETDTSVLESLDPSVFSSAPSFTNFFNDSEPLNIQWEAIANSPETTKALNKELSGQKEADFKKYIKTSFPEYSAKEILANYVEGRRAILDASKYIANLQSLGHKHRSKYLSDILQDMKRDSRITRLSEAFGSTDNLWRIIGNISNLQERAVRWYFNDAKFEQGQEQLDAVKLKNVLVRALKYLRSDDKEWSASQKQIIQSLEQSGDVLDVLAGLDPDRTIPPYEDQNNRRPPEDQTLYLNPKALSSEYGEKWKSWANKFAGAYPLLTEDLTEILKNTDRKSRIKIRSDVLPDSDYRLAYILQRAFDRSIALDECSIRRTAEDFENGVVIKNEKLEDVLSGHQLEEFLEFANRYYQETAKAKNGLWFPENALLERADLHPPMKNKILNVIVGQALGVSPAEGTDFIEEIWNSKVKGRSTVHSICNAIENERKTYGPYFSEDYKFVKTALKEGKTEKELSKKFAAVIKVLKMVSEVVPFIGKELRLSDEAQSKFDNPYSLAQLYNLIETERNGFSKVSLAAHLENAWRMTMTDGSAQCCRLPADCVRPFDGFIRKAIDRNSWEVAKRIAEEVKKSVDFTNGTVKIPVAIEANSFNFTASLTDLKYIQLKEQKLKKKLEDIQRNEENQEKRWLSKEERIRADSHGICAYTGRPLDDVGEIDHIIPRSLTLKKSESIYNSEVNLIFVSAQGNQEKKNNIYLLSNLAKNYLAAVFGASDLSQITNEIESTVLQLKAAGRLGYFDLLSEKERACARHALFLNSDSEARRAVIDVLGSRRKASVNGTQAWFVRSIFSKVRQALAAWTQETGNELIFDAISVPAADSSEMRKRFAEYRPEFRKPKVQPVASHSIDAMCIYLAACSDPFKTKRMGSQLAIYEPINFDNLFTGSCQVIQNTPRNFSDKTNIANSPIFKETIYAERFLDIIVSRGEIFIGYPSNMPFEEKPNRISIGGKDPFSILSVLGAYLDKAPSSEKEKLTIYRVVKNKAFELFSKVAGSKFTAEEDKAAKILEALHFVTVKQDVAATVSDLIKSKKELSKDSIENLAKQKGCLKKVEYSSKEFKFKGSLIIPAAVEWGKVLWNVFKENTAEELKDENALRKALEAAWPSSFGTRNLHSKAKRVFSLPVVATQSGAVRIRRKTAFGDFVYQSQDTNNLYSSFPVKNGKLDWSSPIIHPALQNRNLTAYGYRFVDHDRSISMSEFREVYNKDDLMRIELAQGTSSRRYLRVEMPGEKFLAWFGENSISLGSSFKFSVSEVFDNKIYTENAEFTKFLPKPREDNKHNGTIFFELVGPRVIFNYIVGGAASSLKEIFSEAGKERS

SEQ ID NO: 166 - protein, 1025 aa, gamma proteobacterium
MGGYMPQLMRYRLALDIGSTSIGWAMIRLSMQNEPIAIIRMGVRIFSDGRNPKDGSSLAVTRRVARQMRRRRDRLLKRKTRLLNALVQKKFFPEDADARKALVVLNPYELRKEGLYRQLSGPEFGRALFHISQRRGFLSNRKTDKKDNDSSVLKKAIVDLRQQLEVENCQTIGEWLFKQQQSGKSVRARLRGKTQKDKAYDFYIDRAMIAHEFDTLWVSQAKYDPLLFNEDARAILRDILLYQRPLKPVKPGRCTLIPDESRAPLALPLTQQARIYQELNHLRITTPALGAQALTVAQRNTIAALLEKSDVTFVKIAKALGLTSTTEFNLQDIKRDRLKGNATAIILARNQYFGRRWHDFNADLQNLIVDKLVNEGSETALIEWLKANTDVDESAAERVSGVTLPEGYGSLSVAALRRLLPALKEDVVVYSEAVKRAGFDSHSALSLIEQTGELYQELPYYGEVLQRHVGFGSGDPNDSPERRFGKIANPTVHIGLNELRKIINALIKRYGNPAEVVVELARDLKLSREKRKEIQEEQKQRQDRNEKRIKDACEILGIDPLVIDRGKRREISQKMQLWDELNPKDAANRRCPYTGDQISIEKLLSAEVEIEHILPFSKTLDDSLNNKTVAMRRANRDKGNRTPYEAFGESLNPDYDYDAILQRASLMPREKRKRFASDGYQQWLRDDKDFLSRALNDTAYLSRIAKEYLTLICPPNSVRAIPGRMTAQLRAMFGLNRLLSEGGIKNREDHRHHAIDAAVIGVTDQGLLQKFSRASARTRELQLSRLVDDMPLPWDTYREHVTRALEHLVVSHKPDHGYQGKMHEDTAWGLRDNGQVTRRVRSEDGGPRQRLLENKNVVKINSTRDFSRHGIDEQGQVNAYKGYVGGSNYCIEIWIDEKGKWNSDVVSTFQAYQIVRELGEKAAWQKLRNPLLSLSAKPLVMRLIIDDVVKMQIAGQNKIMRVVKIAQNGQIFFAEHNEANVDARDKDKNNPFKYISKTAGSLQKAGGIHMAISPIGDARPVRYGR

SEQ ID NO: 167 - protein, 1364 aa, Pediococcus acidilactici
MGDRKYNLGLDIGTSSIGFAAVDENNQPIRVKGKTAIGVRLFEEGKTAADRRGFRTTRRRLSRRRWRINLLNEIFDAHLAEVDPTFLARLKESNRSNLDPKKSFQGSLLFPERKDYQFYEEYPTIYHLRKALMEKDRKFDFREIYLAVHHIIKYRGNFLNGTPMRSFKVENIELDTLFDQLNQLYAEIVPDNELAFDLAQVADVKDVLSSTTIYKMDKKKQLVKMMLLPASNKALQSENKKIVTQFVNAILNYKFKLDVLLQVETDADWSLKLNDEGADDKLEEFTGDLDENRLEIIDLLQRLHNWFSLNEITKDGNSLSAAMVEKYENHHHHLGLLKKVIENHPDAKKAKALKETYTAYVGKTDDKTQNQDDFYKAVEKNLDDSPDAKEIKRLIQLDQFMPKQRTGQNGAIPHQLHQQELDQIIEKQSKYYPFLAEPNPNVKRRKDAPYKLDELIAFKIPYYVGPLVTPEEQAQNGENVFAWMKRKAAGPITPWNFDEKVDRMESANRFIRRMTTKDTYLFGEDVLPAESMIYQKFVVLNELNNLKINGRHLSLKDKQDVYNDLFKQQKTVSIKALQNYYVTKKKAATAPTVGGLADPKKFLSSLSTYIDFKNMFGERVNDPQFQEDLEQIVEWSTIFEDRGIFKAKLQALGWLSEKQIQQLVAKRYKGWGRLSKKLLTGLKNAEGYSILDEMWRSTGNFMQIQSRPEFAALIQQANEKQFEGNDPDNVWENIENILGDAYTSPQNKKAIRQVVKVVQDIEKAVGNPPEKIAIEFTREAAANPQRTQSRLRTLEKLYESAEEVVDAGLTAELAEFKENKHVLSDKYYLYFTQLGRDVYTGDTISLDKLNDYDVDHILPQSFIKDDSLDNRVLTIRAVNNGKSDNVPAKMFGKKMGSFWRYLLDNGMISKRKYNNLITDPDNISKYAQKGFINRQLVETSQVIKLTANILNGIYDKDTEIIEVPAKMNSQMRKMFDLVKVREVNDYHHAFDAYLTIFIGNYLYKCYPKLQPYFVYDNFKKFGNKEDIGHKRFNFLGKIEREKKVVAPETGEILWSNVAPNETIKQIKKVYDYKFMIVSREITTRRAELFNQTVYPKNYHGKLIPIKEDRPTDLYGGYSGNTDAYLAIVALEDKKKGKYFKVVGIPTRVAAKLEKLKQQDSQQYLQALHKVIAPQFTKSTKKGIKKTEFEIVLDKVHYRQLVQDGPVKMMLGSSTYKYNAKQLVLSEKALQVIADDRKFDETQKDDNLIAVYDEILSIVNQSFDLYDINGFRKKLNDNRDQFIDLPAETKYEGRKVVAHGKREMILEILKGLHANAAFGNLKPIGFSTAFGQLQVPNGIILSKNAILIHQSPSGLFERKIKLSDL

SEQ ID NO: 168 - protein, 1364 aa, Peptoniphilus duerdenii
MKNLKEYYIGLDIGTASVGWAVTDESYNIPKFNGKKMWGVRLFDDAKTAEERRTQRGSRRRLNRRKERINLLQDLFATEISKVDPNFFLRLDNSDLYREDKDEKLKSKYTLFNDKDFKDRDYHKKYPTIHHLIMDLIEDEGKKDIRLLYLACHYLLKNRGHFIFEGQKFDTKNSFDKSINDLKIHLRDEYNIDLEFNNEDLIEIITDTTLNKTNKKKELKNIVGDTKFLKAISAIMIGSSQKLVDLFEDGEFEETTVKSVDFSTTAFDDKYSEYEEALGDTISLLNILKSIYDSSILENLLKDADKSKDGNKYISKAFVKKFNKHGKDLKTLKRIIKKYLPSEYANIFRNKSINDNYVAYTKSNITSNKRTKASKFTKQEDFYKFIKKHLDTIKETKLNSSENEDLKLIDEMLTDIEFKTFIPKLKSSDNGVIPYQLKLMELKKILDNQSKYYDFLNESDEYGTVKDKVESIMEFRIPYYVGPLNPDSKYAWIKRENTKITPWNFKDIVDLDSSREEFIDRLIGRCTYLKEEKVLPKASLIYNEFMVLNELNNLKLNEFLITEEMKKAIFEELFKTKKKVTLKAVSNLLKKEFNLTGDILLSGTDGDFKQGLNSYIDFKNIIGDKVDRDDYRIKIEEIIKLIVLYEDDKTYLKKKIKSAYKNDFTDDEIKKIAALNYKDWGRLSKRFLTGIEGVDKTTGEKGSIIYFMREYNLNLMELMSGHYTFTEEVEKLNPVENRELCYEMVDELYLSPSVKRMLWQSLRVVDEIKRIIGKDPKKIFIEMARAKEAKNSRKESRKNKLLEFYKFGKKAFINEIGEERYNYLLNEINSEEESKFRWDNLYLYYTQLGRCMYSLEPIDLADLKSNNIYDQDHIYPKSKIYDDSLENRVLVKKNLNHEKGNQYPIPEKVLNKNAYGFWKILFDKGLIGQKKYTRLTRRTPFEERELAEFIERQIVETRQATKETANLLKNICQDSEIVYSKAENASRFRQEFDIIKCRTVNDLHHMHDAYLNIVVGNVYNTKFTKNPLNFIKDKDNVRSYNLENMFKYDVVRGSYTAWIADDSEGNVKAATIKKVKRELEGKNYRFTRMSYIGTGGLYDQNLMRKGKGQIPQKENTNKSNIEKYGGYNKASSAYFALIESDGKAGRERTLETIPIMVYNQEKYGNTEAVDKYLKDNLELQDPKILKDKIKINSLIKLDGFLYNIKGKTGDSLSIAGSVQLIVNKEEQKLIKKMDKFLVKKKDNKDIKVTSFDNIKEEELIKLYKTLSDKLNNGIYSNKRNNQAKNISEALDKFKEISIEEKIDVLNQIILLFQSYNNGCNLKSIGLSAKTGVVFIPKKLNYKECKLINQSITGLFENEVDLLNL

SEQ ID NO: 169 - protein, 1089 aa, Corynebacterium matruchotii
MNSANVNYRVGIDVGSYSLGMAAIAIDDDGKPTEILSAISLIHDSGVDPDSAKSAATRLATSGIARRTRRLYRRKRKRLAKLDKFISSQGWPLKEFEKYEDPFYPWRVRAELATTAITDQQELGEKLSIALRHIARHRGWRNPYSKVTALYTVTEPSDAFLAMQEECAKQLGRTIPETITVGQLVTGMNLGKTRLRGENSLLAARPRQSDNANEIHTIAKVQGLSNELVRQIIDHVFAAESPKGSAAEQVGKDPLQPTKKRALKASDAFQQYRIAALIGNLRIRGGKGNRRLTTEETRLVFDYLRSLPAKQEPTWQLVAEQLKIDRGNLVGTAIMTDDGERAGAKPPVHDTNRIMENTKIKPLATWWKSADADARAAMVKALSNAEVDDFDSQAGAQVQEFFFGISDEDQEKLDGLHLPIGRAAYSEDTLDRLTKRMIGEGMDLYEARQAEFKISNDWAPPAPEIGERVGNPAVDRVLKATARWLNAAERQWGAPKSVNIEHVRAAFMSESSARELDRDNQQRAKRNVKVVAEMQEKLGIEGRPSRADVWRFQSIQRQNGKCAYCGAEISFKNSEMDHIIPQAGEGSTNTRDNLVAVCRECNSSKSNIAFAVWAENTSRPGVSVQKAIERTHHWVTDSGLRKPEFDKFRKQVCDRLRRKATDEPIDARSLESVAWMANELRSRIAQKFKDGDTKVRVYKGALTAEARRASGISGKLEFVDGKGKSRLDRRHHAVDAAVVAFTSNYVAETLALRSNMKFDQELRRKAPQWREFTGSDHVHQVEWTKWKYRMQALAELLNNALVQDRIVVMHNLRLRLGNGAAHEDTIGKLTRLKVGDAISTTDIDRASSEALWCALTRDPDYDPKTGLPENPNRTIRIHGTHLTASDEITVFPVAAASIPIRDGFAKLGSNYHHVRLFRVPSGKKYKYCLMQVYTVDLLKFRKEDLFTVELKPQTISVRTCEALLRKALANGTAEYLGWLVSDDELLIDTSSFDTPGIVKLREEYGPVNRWRLAGLTSVTRLNLRPLYLSKEGLKPNVNPEIKKIIDNRSWIITVNKLFSSGHVKIIRRDALGRPRLHSAAHLPICWEVK

SEQ ID NO: 170 - protein, 1134 aa, Streptococcus mitis
MNGLVLGLDIGIASEGVGILEKNSGKIIHANSRLFPAATADNNVERRKNRQARRLNRRKKHRGVRFQDLFEDYGLLTDFSKVSINLNPYRLRVDGLNQQLTNEELFIALKNIVKRRGISYLDDASEDGGAVSSDYGKAVEENRKLLAEQTPGQIQLERFEKYGQVRGDFTVVENGEKLRLINVFSTSAYKKEAERILRKQQEFNNQITDEFIEDYLKILTGKRKYYHGPGNEKSRTDYGRFRTDGTTLDNIFGILIGKCTFYPEEYRASKASYTAQEFNLLNDLNNLTVPTETKKLSEEQKKVIVEYAKEAKTLGASTLLKYIAKMIDASVDQIRGYRVDVNNKPEMHTFEVYRKMQSLETISVGELSRNVLDELAHILTLNTEREGMEEAINTKLKDSFSQDQVLELVQFRKNNSSLFSKGWHNFSLKLMMELIPELYETSEEQMTILTRLGKQKSKETSKRTKYIDEKELTEEIYNPVVAKSVRQAIKIINEATKKHGIFDNIVIEMARENNEEDAKKDYIKRQKANQDEKNAAMEKAAFQYNGKKELPDNIFHGHKELATKIRLWHQQGEKCLYTGKTIPISDLIYNQYKYEIDHILPLSLSFDDSLSNKVLALATANQEKGQRTPFQALDSMDDAWSYREFKSYVKDLKSLSNKKKDYLLTEEDISKIEVKQKFIERNLVDTRYSSRVVLNALQDFYKSHQFDTTISVVRGQFTSQLRRKWGLEKSRETYHHHAVDALIIAASSQLRLWKKQNNPLITYKEGQFVDSQTGEIISLTDDEYKELVFKAPYDHFVDTLSSKTFEDSILFSYQVDSKFNRKISDATIYATRKAKLDKEKKEYTYTLGKIKDIYSLGTKTPSKTGFYKFLDLYNKDKSQFLMFQKDRKTWDEVIEKIMEQYRPFKEYDKTGKLVDFNPFEKYRQENEPIRKYSKKGNGPEIKSLKYYDILLGKHKNITPEGSRNTVALLSLNPWRTDVYYNMETKKYEFLGLKYADLPFEEGGAYGISTETYNELREKEGIGKNSEFKFTLYKNDLILIKDTETNCQQIFRFWSRTGKDNPKSFEKHKIELKPYEKARFEKGEELEVLGKVPPSSNQLQKNMQIENLSIYKVKTDVLGNKHFIKKEGDKPKLKF

SEQ ID NO: 171 - protein, 1373 aa, Streptococcus bovis
MTKKNYSIGLDIGTNSVGWAVITDDYKVPAKKMKVLGNTDKKYIKKNLLGALLFDSGETAEATRLKRTARRRYTRRKNRLRYLQEIFAEEMTKVDESFFQRLDESFLRWDDDNKKLGRYPIFGNKADVVKYHQEFPTIYHLRKHLADSSEKADLRLVYLALAHMIKFRGHFLIEGELNAENTDVQKIFADFVGVYDRTFDDSHLSEITVDAASILTEKISKSRRLENLIKYYPTEKKNTLFGNLIALALGLQPNFKMNFKLSEDAKLQFSKDSYEEDLGELLGKIGDDYADLFTSAKNLYDAILLSGILIVDDNSTKAPLSASMIKRYVEHQEDLEKLKEFIKANKSELYHDIFKDKNKNGYAGYIENGVKQDEFYKYLKNTLSKIAGSDYFLDKIEREDFLRKQRTFDNGSIPHQIHLQEMHAILRRQGDYYPFLKENQDRIEKILTFRIPYYVGPLARKDSRFSWAEYHSDEKITPWNFDKVIDKEKSAEKFITRMTLNDLYLPEEKVLPKHSHVYETYAVYNELTKIKYVNEQGKDSFFDSNMKQEIFDHVFKENRKVTKEKLLNYLNKEFPEYRIKDLIGLDKENKSFNASLGTYHDLKKILDKAFLDDKVNEEVIEDIIKTLTLFEDKDMIHERLQKYSDIFTADQLKKLERRHYTGWGRLSYKLINGIRNKENNKTILDYLIDDGSANRNFMQLINDDTLPFKQIIQKSQVVGDVDDIEAVVHDLPGSPAIKKGILQSVKIVDELVKVMGDNPDNIVIEMARENQTTNRGRSQSQQRLKKLQNSLKELGSNILNEEKPSYIEDKVENSHLQNDQLFLYYIQNGKDMYTGDELDIDHLSDYDIDHIIPQAFIKDDSIDNRVLTSSAKNRGKSDDVPSLDIVRARKAEWVRLYKSGLISKRKFDNLTKAERGGLTEADKAGFIKRQLVETRQITKHVAQILDARFNTESDENDKVIRDVKVITLKSNLVSQFRKDFEFYKVREINDYHHAHDAYLNAVVGTALLKKYPKLASEFVYGEYKKYDIRKFITNSSDKATAKYFFYSNLMNFFKRVIRYSNGKVIVRPVVEYSKDTEDIAWDKKSNFRTICKVLSYPQVNIVKKVETQTGGFSKESILPKGDSDKLIPRKTKKAYWDTKKYGGFDSPTVAYSVFVVADVEKGKAKKLKTVKELVGISIMERSFFEENPVEFLENKGYHNIREDKLIKLPKYSLFEFEGGKRRLLASASELQKGNEMVIPGHLVKLLYHAQRINSFNSTKYLDYVSAHKKEFEKVLSCVEDFANLYVDVEKNLSKIRAVADSMDNFSIEEISNSFINLLTLTALGAPADFNFLGEKIPRKRYTSTKECLNATLIHQSITGLYETRIDLSKIGEE

SEQ ID NO: 172 - protein, 1099 aa, Corynebacterium accolens
MSLLYRVGIDVGTYSLGCTAIEVDDNDQPVSILSSVSLIHDSGLDPDQQKRAVTRLASSGVARRTRRLYRRRRRRMVKLENFLTAQGWETLPFERYSDPYLPWHARVALVNGYISDDTQRGQYLSIAFRHIANHRGWRNPYWKVSSLYSPDKPSDAFEQIRKELEASTGRQIPETATVGQLISFAQFGKDRLRGGGKQKDKKKPQEQVNQAVISARLHQIDHAREINEICRVQKIDDTLRKQILDLVFAAESPKGAQKGRVGKDPLQPKLFRALKASDAFQQYRIAALTGNLRIYRNGVTVPLDRDEKLIVFNYLVNLPKKEEPSWLKIAEILNIDRGQLRGTATMTDDGERAGATPPVHDTNRTILDSKVKPLAHWWENASDDERAAMLKSLSNSEVEDFDSPAGAQVQAFFADLDETEQEKLDSLHLPMGRAAYSEDTLMRLTNRMLDENLDLYEARLAEFGIPKDWAPPAPRIGEPVGNPAVDRVLKGVARWLEAAADEWGAPKSVVIEHVRDGFVSKSKAIEIDRANNNRHKRNRELFQKMQENLGIEGKVRSSDLWRYQSVQRQNCQCAYCGSPITYTTCEMDHIVPRAGEGSTNTRDNLVATCHRCNLAKKNIPFAVWAEKSTIPGVSVKEALDRTRHWSEDSGMSKKDFQKFRKNVCERLNRTVVDEPLDARSMESVAWMANELRGRVAQRFQEENTTVNVYRGALTAEARRAAGITDKLRFIDGTGKSRLDRRHHAVDAAVVAFIHNYVAETLAIRSNKKREAQLLQGTSQWKEFTGSDDKHRAVWNAWIPKMQKLAVLLQIALDEDRIVVTSNLRLRLGNGRAHEDTISELKTIRVGDAISVTDIDRASSEALWCALTREPDFDEKDGLPENPNRRIRVHGTWYDAEDEIEVFPVGAGAIKVRGGYAKLSRFHHARVYKIPGKKAPIYCMLRVYNTDLVQHRHEDLFSVELKPQTMSVRQAEPKLRKALAENTAEYLGWLVTDDELIIDTSTFRTGLIEEMQSEFGLVRRWRLDGFDSPSLLTLRPLHMSAEGLPDDCALGSRKIIDTKGWRVSINKVFNAGNTTVVRRDALGRARLTSNAHLPISWKEE

SEQ ID NO: 173 - protein, 1054 aa, Actinobacillus pleuropneumoniae
MKLTPLNYILGLDLGIASVGWAVVEIDEQENPLGLIDVGVRTFDRAEVAKTGESLALARRLARSSRRLVKRRADRIKKVKRLLKSENILLSADEQLPNDVWQLRVKGLDQKLERQEWAAVLLHLLKHRGYLSQRKNESKSENKELGALRSGVAANHQILQSAEYRTPAEIAVKKFHVEEGHIRNQRGAYTHTFSRLDLLAEIELLFTRQTELGNPHTSAKLLENLTALLMWQKPALAGEAILKMLGKCTFEPTEYKAAKNSYSAERFVWLTKLNNLRILEQGAERALTDNERFALLDQPYEKAKFTYAQARTMLALPDEAIFKGVRYQGEDKKAVETKTILMEMKAYHQIRKALENADLKAEWNELKNNSELLDDIGTAFSLHKTDEDICRYLDGKLSESILNALLENLNFDKFIQLSLKALQQILPLMLQGQRYDEAVSAIYGDHYGKKSAEINRLLPTIPADEIRNPVVLRTLTQARKVINAVVRLYGSPARIHIETGREVGKSYQDRKKLEKQQEDNRKHRESAVQKFKEYFPNFVGEPKGKDILKMRLYELQQAKCLYSGKSLELHRLLEKGYVEVDHALPFSRTWDDSFNNKVLVLANENQNKGNLTPYEWLDGKNNSEPWQNFVARVQTSGFSHTKKQRILSHKLDEKGFIERNLNDTRYVVRFLCNFIADNMLLTGKGKRKVFASNGQITALLRGRWGLQKVRDDNDRHHALDAVVVACSTVAMQQKITRFVRYEEGNVFSGERIDRETGEIIPLHFPSPWAFFRENVEIRIFSENPKLELENRLPDYPQYNHEFVQPLFVSRMPTRKMTGQGHMETVKSAKRLDEGLSVLKVPLTQLKLNDLERMVNREREMALYESLKVRLEQFDNDPAKAFAEPFYKKGGALVKAVRVEQTQKSGVLVRDGNGVADNASMVRVDVFTKAGKYFLVPIYTWQVAKGILPNKAVTANVDEIDWLEMDESYQFIFTMYPNDLVKVKLKKEEFFGYYGGLDRATGAIVIKEHDLEKSKGRQGIYRIGVKLALSFEKYQVDELGKNIRPCRPTKRQHVR

SEQ ID NO: 174 - protein, 1369 aa, Lactobacillus iners
MNNNYYLGLDLGTNSVGWAVTDDHYNIIKFHGKHMWGMRLFEEAETAKDRRLHRQARRRRQRLVERINLLEELFDKEISKVDQGFFARKKESDLHFEDKTTKSEYALFNDKSYTDRDYYKQYPTIFHLIMDLIENDKKRDIRLVYLACHYLIKHRGHFIFDGKNFTVDNSFENLLDKLITYLKDNDDITLSFPKDQLINIFKNSNLNSTEKSDQLKPFFGRTNLEKGIIKLLSGGKQDLSNMFRDETLKNSNYKNLKFSDNRFDDERDGYAADLGDRIDLLILLKQIYDASILESMMSQARVSIDGHKYISSAKVCAYEKHKSDLKRLKSLIKKYLPSEYNNIFRKITEKDNYVAYSKSNITNNKREKALKYVKYVDFTKYLTKKLKTIKTQDAEDDQEIFEIKGELEKQSFLPKQRTLDNSIIPYQLHLMELKKILDNQSKYYDFLLAKDDQEGITVKDKIISLLTFRLPYYIGPVNPAVHGKFAWVKRLANGKVTPWNYKEKIDIDASHEEFIKTKLSKCSFLIGCDVLPKNSLLYQKYMVLSELNTIKFNGVNISEKLKDDIYQNLFKNIQKVTKKRLQNYIKEHENIIGDVIVTGIDNAFKQGLVSYLKFKKIIGDKVDDDRYQKVLEKIIRDITLYDECAGKKIKKEYKDSDLFTEDELNKIVKLTFNDWGRLSAELLDQLEGEDTVSGETGKIIEFMQKHNYNLMQLMSKKFTFKSKIDEINKSYYQHDKFNYKSMIDSLYVSPATKRILWQSLKVVHEISKIMKHDPEKIFIEMARSKEDHPKRKLSRKADLKQVYKDSKKQIISIIGKDKYQDLSNELDNKDDRDLRWDNLYLYYTQLGRSMYSLKPIDISELMNKNLYDQDHIFPKSKKYDDSIENRVLVEKELNVKKSDIYPISDANIIPQKIKGQVESFWKMLYDHKLIGDKKYARLIRSKAFTDDELAGFIARQLVETRQATKETADLLKRLCPKSRIVYAKAQNASIFRQKFDIPKSRTINDLHHAQDAYLNIVVGNIFDTKFTQDPRNFIKNTKDSRNYNLEKIYDYNVERNNYVAWIAPDGETNGTIANVKCNLSTKDFRVTRPSFYKKGALFNQNLSRKGSNLAPIKEHSPKSNPLKYGGYSGKNNSFFVVVAGKDNKGKDIVKLIPVNTLIYNKMLHCDYKAKQELLTSYVANNFAINNFRIVKDDIKMYSLVKIDGAYYYLVGGTDERIEVKNAMQLLLSKDSIKAVKILEKESKDQFANIKNYKDIDIKLGRTFNEVVSKYTNSVFGKSMLISDKYRKDIFKSVEKSILEFNHLDTIGKADNLLKFVTLMRPSGSAHSLKMVGLIERIRKSNVISNFNEFKLINQSVTGLFENEEDLLKL

SEQ ID NO: 175 - protein, 1420 aa, Bifidobacterium bifidum
MSRKNYVDDYAISLDIGNASVGWSAFTPNYRLVRAKGHELIGVRLFDPADTAESRRMARTTRRRYSRRRWRLRLLDALFDQALSEIDPSFLARRKYSWVHPDDENNADCWYGSVLFDSNEQDKRFYEKYPTIYHLRKALMEDDSQHDIREIYLAIHHMVKYRGNFLVEGTLESSNAFKEDELLKLLGRITRYEMSEGEQNSDIEQDDENKLVAPANGQLADALCATRGSRSMRVDNALEALSAVNDLSREQRAIVKAIFAGLEGNKLDLAKIFVSKEFSSENKKILGIYFNKSDYEEKCVQIVDSGLLDDEEREFLDRMQGQYNAIALKQLLGRSTSVSDSKCASYDAHRANWNLIKLQLRTKENEKDINENYGILVGWKIDSGQRKSVRGESAYENMRKKANVFFKKMIETSDLSETDKNRLIHDIEEDKLFPIQRDSDNGVIPHQLHQNELKQIIKKQGKYYPFLLDAFEKDGKQINKIEGLLTFRVPYFVGPLVVPEDLQKSDNSENHWMVRKKKGEITPWNFDEMVDKDASGRKFIERLVGTDSYLLGEPTLPKNSLLYQEYEVLNELNNVRLSVRTGNHWNDKRRMRLGREEKTLLCQRLFMKGQTVTKRTAENLLRKEYGRTYELSGLSDESKFTSSLSTYGKMCRIFGEKYVNEHRDLMEKIVELQTVFEDKETLLHQLRQLEGISEADCALLVNTHYTGWGRLSRKLLTTKAGECKISDDFAPRKHSIIEIMRAEDRNLMEIITDKQLGFSDWIEQENLGAENGSSLMEVVDDLRVSPKVKRGIIQSIRLIDDISKAVGKRPSRIFLELADDIQPSGRTISRKSRLQDLYRNANLGKEFKGIADELNACSDKDLQDDRLFLYYTQLGKDMYTGEELDLDRLSSAYDIDHIIPQAVTQNDSIDNRVLVARAENARKTDSFTYMPQIADRMRNFWQILLDNGLISRVKFERLTRQNEFSEREKERFVQRSLVETRQIMKNVATLMRQRYGNSAAVIGLNAELTKEMHRYLGFSHKNRDINDYHHAQDALCVGIAGQFAANRGFFADGEVSDGAQNSYNQYLRDYLRGYREKLSAEDRKQGRAFGFIVGSMRSQDEQKRVNPRTGEVVWSEEDKDYLRKVMNYRKMLVTQKVGDDFGALYDETRYAATDPKGIKGIPFDGAKQDTSLYGGFSSAKPAYAVLIESKGKTRLVNVTMQEYSLLGDRPSDDELRKVLAKKKSEYAKANILLRHVPKMQLIRYGGGLMVIKSAGELNNAQQLWLPYEEYCYFDDLSQGKGSLEKDDLKKLLDSILGSVQCLYPWHRFTEEELADLHVAFDKLPEDEKKNVITGIVSALHADAKTANLSIVGMTGSWRRMNNKSGYTFSDEDEFIFQSPSGLFEKRVTVGELKRKAKKEVNSKYRTNEKRLPTLSGASQP

SEQ ID NO: 176 - protein, 1092 aa, Ilyobacter polytropus
MKYSIGLDIGIASVGWSVINKDKERIEDMGVRIFQKAENPKDGSSLASSRREKRGSRRRNRRKKHRLDRIKNILCESGLVKKNEIEKIYKNAYLKSPWELRAKSLEAKISNKEIAQILLHIAKRRGFKSFRKTDRNADDTGKLLSGIQENKKIMEEKGYLTIGDMVAKDPKFNTHVRNKAGSYLFSFSRKLLEDEVRKIQAKQKELGNTHFTDDVLEKYIEVFNSQRNFDEGPSKPSPYYSEIGQIAKMIGNCTFESSEKRTAKNTWSGERFVFLQKLNNFRIVGLSGKRPLTEEERDIVEKEVYLKKEVRYEKLRKILYLKEEERFGDLNYSKDEKQDKKTEKTKFISLIGNYTIKKLNLSEKLKSEIEEDKSKLDKIIEILTFNKSDKTIESNLKKLELSREDIEILLSEEFSGTLNLSLKAIKKILPYLEKGLSYNEACEKADYDYKNNGIKFKRGELLPVVDKDLIANPVVLRAISQTRKVVNAIIRKYGTPHTIHVEVARDLAKSYDDRQTIIKENKKRELENEKTKKFISEEFGIKNVKGKLLLKYRLYQEQEGRCAYSRKELSLSEVILDESMTDIDHIIPYSRSMDDSYSNKVLVLSGENRKKSNLLPKEYFDRQGRDWDTFVLNVKAMKIHPRKKSNLLKEKFTREDNKDWKSRALNDTRYISRFVANYLENALEYRDDSPKKRVFMIPGQLTAQLRARWRLNKVRENGDLHHALDAAVVAVTDQKAINNISNISRYKELKNCKDVIPSIEYHADEETGEVYFEEVKDTRFPMPWSGFDLELQKRLESENPREEFYNLLSDKRYLGWFNYEEGFIEKLRPVFVSRMPNRGVKGQAHQETIRSSKKISNQIAVSKKPLNSIKLKDLEKMQGRDTDRKLYEALKNRLEEYDDKPEKAFAEPFYKPTNSGKRGPLVRGIKVEEKQNVGVYVNGGQASNGSMVRIDVFRKNGKFYTVPIYVHQTLLKELPNRAINGKPYKDWDLIDGSFEFLYSFYPNDLIEIEFGKSKSIKNDNKLTKTEIPEVNLSEVLGYYRGMDTSTGAATIDTQDGKIQMRIGIKTVKNIKKYQVDVLGNVYKVKREKRQTF

SEQ ID NO: 177 - protein, 994 aa, Streptococcus downei
MENQRGKRQRITHQEPYSIGLDIGTASVGSAVINNDLTVPQKRFKVRDINGNVIKTIKKNMSSVLIFDEANPAKGARTKRTSRRRYTRRNFRLLELKKLFEKEIEKIDPNFFHRIKEDSFFNWNDKEFDKHPLFGNLKEEKKFHNNYPTVFHLRNEIGKNSSKKFDLRLVYLALAHIIKYRGHFLDETFDPDASVSVEKRLNDFIVEYNELFDKDLRSEAKFSEILMSDSSNSVKIESTLSLYPSEKNTIFQVFLKLIVGNQGDFNKFFKDELESSSHSGKLVFSSDEVEDEKEELISIIGEDYLDIINLCQSLYSTVALAKIISTDTGESNTPLSASMVKRYNEHKGDLANLKGIVKHFIPEKYEEVFGEHSKTGYTAYIRNPNKMPEKKFYDYLYHEGEKGKISGILSDSRIYELPAVQKFILKIEQKSFLKKQRTKENGLIPYQLHLKELKIIIENQSEYYPFLHEIEEKLEKLLTFRIPYFVGPLAQTKYINPRFNWLVRKSEDHIKPWNFSEIVDEEKSATKFIEKLISNDQFLFGEKVLPKRSIIYQQFLIFNELTKVSYQIKDGPSRNFDSETKEEIFNSLFKKNKLGCVTVVDLKNYIKNDQCLSEKEDIQIEGIKKKFNSSYSTYADLSEISGLKELLDDDTQLDLVEEIIRILTVFEDKKMRTKQLEKLNLPANVDIEKLCKKHYKGWANVSRQLIDGIADRSRGFKKTILDYLKDDDIPNNDAFSTKVQKSLNRNFAQLITDKSLDFARKLDESYKIDVKKDYPSLVEDIPGSPAIRRAILQSLYTVDEIIGVMGRMPKNIVIEMARTNEVSDSPKTRKERIKKLIKETENDADALNFGISKVSEIFDEVKKDENLFKELEVYLYFLQEGKDMYGTETREGHRQPKEINFYDVKNSTGKYHIDHIIPQSLYSGNPLDNIVLTESTNNKIKDKDVPDEATVYEMKNFWLYLMKKGAISKKKFSFLTKIEQGGLSNEDKFGFINR

SEQ ID NO: 178 - protein, 1052 aa, Aminomonas paucivorans
MIGEHVRGGCLFDDHWTPNWGAFRLPNTVRTFTKAENPKDGSSLAEPRRQARGLRRRLRRKTQRLEDLRRLLAKEGVLSLSDLETLFRETPAKDPYQLRAEGLDRPLSFPEWVRVLYHITKHRGFQSNRRNPVEDGQERSRQEEEGKLLSGVGENERLLREGGYRTAGEMLARDPKFQDHRRNRAGDYSHTLSRSLLLEEARRLFQSQRTLGNPHASSNLEEAFLHLVAFQNPFASGEDIRNKAGHCSLEPDQIRAPRRSASAETFMLLQKTGNLRLIHRRTGEERPLTDKEREQIHLLAWKQEKVTHKTLRRHLEIPEEWLFTGLPYHRSGDKAEEKLFVHLAGIHEIRKALDKGPDPAVWDTLRSRRDLLDSIADTLTFYKNEDEILPRLESLGLSPENARALAPLSFSGTAHLSLSALGKLLPHLEEGKSYTQARADAGYAAPPPDRHPKLPPLEEADWRNPVVFRALTQTRKVVNALVRRYGPPWCIHLETARELSQPAKVRRRIETEQQANEKKKQQAEREFLDIVGTAPGPGDLLKMRLWREQGGFCPYCEEYLNPTRLAEPGYAEMDHILPYSRSLDNGWHNRVLVHGKDNRDKGNRTPFEAFGGDTARWDRLVAWVQASHLSAPKKRNLLREDFGEEAERELKDRNLTDTRFITKTAATLLRDRLTFHPEAPKDPVMTLNGRLTAFLRKQWGLHKNRKNGDLHHALDAAVLAVASRSFVYRLSSHNAAWGELPRGREAENGFSLPYPAFRSEVLARLCPTREEILLRLDQGGVGYDEAFRNGLRPVFVSRAPSRRLRGKAHMETLRSPKWKDHPEGPRTASRIPLKDLNLEKLERMVGKDRDRKLYEALRERLAAFGGNGKKAFVAPFRKPCRSGEGPLVRSLRIFDSGYSGVELRDGGEVYAVADHESMVRVDVYAKKNRFYLVPVYVADVARGIVKNRAIVAHKSEEEWDLVDGSFDFRFSLFPGDLVEIEKKDGAYLGYYKSCHRGDGRLLLDRHDRMPRESDCGTFYVSTRKDVLSMSKYQVDPLGEIRLVGSEKPPFVL

SEQ ID NO: 179 - protein, 1023 aa, Helicobacter cinaedi
MKIYSFDIGVASIGWAFIENEVLQDCGIRIFTKAENPKNGASLALPRREARGVRKRLARRRGRLNTIKQLLCKEFGLQLEDYLSNDGELPKAYTASKANPLKSPYELRTLALSQKLDSKDLVRVILHIAKHRGYGNKHAKDSKDTESGKVKKAIEFNRKTLAEKGYRSVGEYLYREFFQQSRISQNNGATEFINVRNKAGNYEHCVAQDMLKEELESILNAQRQFGFSLKQDFENKLLTKIFEQRPLKSFADKVGNCCFIAGEKRAPKDSPSAIEFIALSRTINTLINLSKESGEIYNRAIILQIVESTLKKGEISYKELREIIRLDERLRFKDPRLDYSREIKEAEKVKFLEFKQLKGFKKALGESFTTLAISQLDEIAEHIALIKDRVKLNEKLESYALTKEQREALSNLSFSAHINLSLQALKQILPFMRGDNGEQCLDYDESVEKAGLKALSKDTLKGQMLPPLNEFEPYLSNPVVARALAEYRKVLNVLLKQYGSPHKIHIEYAREAKLSSTERQKYEKEQKDNYAANQAAHKKCQELGLEPSSTNLLKLKLWQEQGGLCLYSGAKITISYLQDPTALQVDHIYPYSRSFDDSYMNKCLVLTKANQEKGNRTPFEAFGTDSAKWGVITTLAQKLPHKKRRRILNTAFNDKEAGFKLRNLNDTSYIARLVADYTETYLEFLPLVESENTTLSKGQKGSKKHIAIVNGVLTSTMRYYLGFASKDRDNHLHHALDAVIIGFMNDSVIKAFSDFKKTQETSKAAYYAHTLSKQEYKKQRAFIQLPSGENFRVSVLEKVESVFVSKPPRKRVRGALHEATFYSPNDPKLLKNYGGTKGVERALALGKMRKVGAKIVSNGAMVRVDIFRHKSSGKFYGVPVYTMDFALGILPNKAVVVGKDQNGVIKDWLEMDSSYEFIFSLYKDDVILVQKKEMQRPELCYFVSFDTSGASIKVAKHDNNFSTLTENQKLLFSNATKEEVVGKSIGIQNLKVFEKWQVSVLGEVKRTQSYPRENISLASKAKK

SEQ ID NO: 180 - protein, 874 aa, Listeria seeligeri
LANGQSEFSWLTRKADGEIRPWNIEEKVDFGKSAIDFIEKMTNKDTYLPKENVLPKHSMCYQKYMVYNELTKIRYTDDQGKTHYFSGQEKQQIFNDLFKQKRKVKKKDLELFLYNMNHVESPTVEGVEDAFNSSFTTYHDLQKVGVPQEILDDPLNTEMLEEIIKILTVFEDKRMINERLQEFSNVLDEAVLKKLERRHYTGWGRLSAKLLIGIRDKESHLTILDYLMNDDKHNRNLMQLINDSNLSFKSIIEKEQVSTADKDIQSIVADLAGSPAIKKGILQSLKIVDELVGIMGYPPQTIVVEMARENQTTGKGKNNSKPRFTSLEKAIKELGSQILKEHPTDNQGLKNDRLYLYYLQNGKDMYTGQELDIHNLSNYDIDHVVPQSFITDNSIDNRVLASSAANREKGDNVPSLEVVRKRKVYWEKLYQAKLMSKRKFDYLTKAERGGLTEADKARFIHRQLVETRQITKNVANILHQRFNCKKDESGNVIEQVRIVTLKAALVSQFRKQFQLYKVREVNDYHHAHDAYLNCVVANTLLKVYPQLEPEFVYGDYHQFDWFKANKATAKKQFYTNIMLFFAKKDRIIDENGEILWDKKYLDTIKKVLNYRQMNIVKKTEIQKGEFSNATANPKGNSSKLIPRKADWDPIKYGGFDGSNMAYAIVIEHEKRKKKTVIKKELIQINIMERTAFEKDQKEFLEGKGYRNPKVITKIPKYTLYECENGRRRMLGSANEAQKGNQMVLPNHLMTLLYHAKNCEASDGKSLAYIESHREMFAELLDSISEFASRYTLADANLEKINTIFEQNKSGDVKVIAQSFVNLLEFNAMGAPASFKYFETNIERKRYNNLKELLNATIIYQSITGLYEARKRLDD

SEQ ID NO: 181 - protein, 1082 aa, Neisseria lactamica
MAAFKPNPMNYILGLDIGIASVGWAMVEIDKEENPIRLIDLGVRVFERAEVPKTGDSLAMARRLARSVRRLTRRRAHRLLRARRLLKREGVLQDADFDENGLVKSLPNTPWQLRAAALDRKLTCLEWSAVLLHLIKHRGYLSQRKNEGETADKELGALLKGVADNAHALQTGDFRTPAELALNKFEKESGHIRNQRGDYSHTFSRKDLQAELNLLFEKQKEFSNPHVSDSLKEGIETLLMAQRPALSGDAVQKMLGHCTFEPAEPKAAKNTYTAERFIWLTKLNNLRILEQGSERPLTDTERATLMDEPYRKSKLTYAQARKLLGLEDTAFFKGLRYGKDNAEAPTLMEMKAYHAISRALEKEGLKDKKSPLNLSTELQDEIGTAFSLFKTDKDITGRLKDRVQPEILEALLKHISFDKFVQISLKALRRIVPLMEQGKRYDEACAEIYGDHYCKKNAEEKIYLPPIPADEIRNPVVLRALSQARKVINCVVRRYGSPARIHIETAREVGKSFKDRKEIEKRQEENRKDREKAAAKFREYFPNFVGEPKSKDILKLRLYEQQHGKCLYSGKEINLVRLNEKGYVEIDHALPFSRTWDDSFNNKVLVLGSENQNKGNQTPYEYFNGKDNSREWQEFKARVETSRFPRSKKQRILLQKFDEEGFKERNLNDTRYVNRFLCQFVADHILLTGKGKRRVFASNGQITNLLRGFWGLRKVRAENDRHHALDAVVVACSTVAMQQKITRFVRYKEMNAFDGKTIDKETGEVLHQKAHFPQPWEFFAQEVMIRVFGKPDGKPEFEEADTPEKLRTLLAEKLSSRPEAVHEYVTPLFVSRAPNRKMSGQGHMETVKSAKRLDEGISVLRVPLTQLKLKGLEKMVNREREPKLYDALKAQLETHKDNPAKAFAEPFYKYDKAGNRTQQVKAVRIEQVQKTGVWVRNHNGIADNATMVRVDVFEKGGKYYLVPIYSWQVAKGILPDRAVVAFKDEEDWTVMDDSFEFRFVLYANDLIKLTAKKNEFLGYFVSLNRATGAIDIRTHDTDSTKGKNGIFQSVGVKTALSFQKNQIDELGKEIRPCRLKKRPPVR

SEQ ID NO: 182 - protein, 1326 aa, Streptococcus pseudoporcinus
MLGTVLFDSGETAQARRLKRTNRRRYTRRRYRLCQLQNIFATEMVKVDDTFFQRLSESFFYYQDKAFDKHPIFGNSKEERAYHKTYPTIYHLRKDLADRDQKADLRLIYLALSHIIKFRGHFLIEGKLNSENTDVQKLFIALVTVYNLLFEEEPIAGETCDAKALLTAKTSKSKRLESLISEFPGQKKNGLFGNLLALALGLRPNFKSNFGLSEDAKLQITKDTYEEELDNLLAEIGDHYADLFLAAKNLSDAILLSDILTLSDENTRAPLSASMIKRYEEHQEDLALLKKLVKEQMPEKYWEIFSNAKKNGYAGYIEGKVSQEDFYRYIKPILSRLKGGDEFLAKIDRDDFLRKQRTFDNGSIPHQIHLKELHAILRRQEKYYPFLAEQKEKIEQLLCFRIPYYVGPLAKGGNSSFAWLKRRSDEPITPWNFKDVVDEEASAQAFIEGMTNYDTYLPEEKVLPKHSPLYEMFTVYNELTKVKYIAENMTKPLYLSAEQKEAIIDHLFKQTRKVTVKDLKEKYFSQIEGLENVDVTGVEGAFNASLGTYNDLLKIIKDKAFLDDEANAEILEEIVLILTLFQDEKLIEKRLAKYANLFEKSVLKKLRKRHYRGWGRLSRQLIDGMKDKASGKTILDFLKADDFANRNFIQLINDSSLDFEKLIDDAQKKAIKRESLTEAVANLAGSPAIKKGILQSLKVVDEIVKVMGHNPDNIVIEMSRENQTTAQGLKNARQRLKKIKEVHKKTGSRILEDNSERITNLTLQDNRLYLYLLQDGKDMYTGQDLDINNLSQYDIDHIIPQSFIKDNSIDNLVLTTQKANRGKSDNVPSIEVVRDMKDRVWRRQLANGAISRQKFDHLTKAERGGLADSDKARFLRRQLVETRQITKHVAQLLDSRFNSKSNQNKKLARNVKIITLKSKIVSDFRKDFGLYKLREVNNYHHAHDAYLNAVVGTALLKKYPKLEAEFVYGDYKHFDLVKLISKSDPSLGKATAKVFFYSNIMNFFKEELSLADGTLMKRPVIETNTETGEVVWDKVKDFKTIRKVLSYPQVNIVKKTEIQSGAFSKESVLSKGNSDKLIERKKGWDPKKYGGFDSPNTAYSIFVVAKVAKRKAQKLKTVKEIVGITIMEQAEYEKDNIAFLEKKGYQDIQEKLLIKLPKYSLFELENGRRRLLASANEFQKGNELALSGKYMKFLYLASRYDKLSSKIESEQQKKLFVEQHLHYFDEILDIVVKHATCYIKAENNLKKIISLYKKKEAYSINEQALNMLNLFIFTSLGAPSTFVFFDETIDRKRYTTSSDVLNGILIQQSITGLYETRIDLSRFGGD

SEQ ID NO: 183 - protein, 1150 aa, Enterococcus faecalis
MYSIGLDLGISSVGWSVIDERTGNVIDLGVRLFSAKNSEKNLERRTNRGGRRLIRRKTNRLKDAKKILAAVGFYEDKSLKNSCPYQLRVKGLTEPLSRGEIYKVTLHILKKRGISYLDEVDTEAAKESQDYKEQVRKNAQLLTKYTPGQIQLQRLKENNRVKTGINAQGNYQLNVFKVSAYANELATILKTQQAFYPNELTDDWIALFVQPGIAEEAGLIYRKRPYYHGPGNEANNSPYGRWSDFQKTGEPATNIFDKLIGKDFQGELRASGLSLSAQQYNLLNDLTNLKIDGEVPLSSEQKEYILTELMTKEFTRFGVNDVVKLLGVKKERLSGWRLDKKGKPEIHTLKGYRNWRKIFAEAGIDLATLPTETIDCLAKVLTLNTEREGIENTLAFELPELSESVKLLVLDRYKELSQSISTQSWHRFSLKTLHLLIPELMNATSEQNTLLEQFQLKSDVRKRYSEYKKLPTKDVLAEIYNPTVNKTVSQAFKVIDALLVKYGKEQIRYITIEMPRDDNEEDEKKRIKELHAKNSQRKNDSQSYFMQKSGWSQEKFQTTIQKNRRFLAKLLYYYEQDGICAYTGLPISPELLVSDSTEIDHIIPISISLDDSINNKVLVLSKANQVKGQQTPYDAWMDGSFKKINGKFSNWDDYQKWVESRHFSHKKENNLLETRNIFDSEQVEKFLARNLNDTRYASRLVLNTLQSFFTNQETKVRVVNGSFTHTLRKKWGADLDKTRETHHHHAVDATLCAVTSFVKVSRYHYAVKEETGEKVMREIDFETGEIVNEMSYWEFKKSKKYERKTYQVKWPNFREQLKPVNLHPRIKFSHQVDRKANRKLSDATIYSVREKTEVKTLKSGKQKITTDEYTIGKIKDIYTLDGWEAFKKKQDKLLMKDLDEKTYERLLSIAETTPDFQEVEEKNGKVKRVKRSPFAVYCEENDIPAIQKYAKKNNGPLIRSLKYYDGKLNKHINITKDSQGRPVEKTKNGRKVTLQSLKPYRYDIYQDLETKAYYTVQLYYSDLRFVEGKYGITEKEYMKKVAEQTKGQVVRFCFSLQKNDGLEIEWKDSQRYDVRFYNFQSANSINFKGLEQEMMPAENQFKQKPYNNGAINLNIAKYGKEGKKLRKFNTDILGKKHYLFYEKEPKNIIK

SEQ ID NO: 184 - protein, 1150 aa, Enterococcus faecalis
MYSIGLDLGVSSVGWSVIDERTGNVIDLGVRLFSAKNSEKNLERRTNRGGRRLIRRKTNRLKDAKKILAAVGFYEDKSLKNSCPYQLRVKGLTEPLSKGEIYKVTLHILKKRGISYLDEDDTEAAKESQDYKEQVRENAQLLTKYTPGQIQLQRLKENNRVKTGINAQGNYQLNVFKVSAYANELATILKTQQAFYPNELTDDWIALFVQPGIAEEAGLIYRKRPYYHGPGNEANNSPYGRWSDFKKTGQPATNIFDKLIGKDFQGELRASGLSLSAQQYNLLNDLTNLKIDGEIPLSPEQKEYILAELMTKEFTRFGINDVAKLLGVKKERLSGWRLDKKGKPEIHTLKGYRNWRKIFAESGIDLATLPTETIDCLAKVLTLNTEREGIENTLAFELPELAESVKLLVLDRYKELSQSVSTQAWHRFSLKTLHLLIPELMNATSEQNTLLEQFQLKSDVRKRYSEYKKLPTKDVLTEIYNPTVNKTVSQAFKVIDALLVKYGKEQIRYITIEMPRDDNEEDEKKRIKELHAKNSQRKNDSQSYFMQKSGWSQEKFQTTIQKNRRFLAKLLYYYEQDGICAYTGLSISPELLVSDSTEIDHIIPISISLDDSINNKVLVLSKANQVKGQQTPYDAWMDGSFKKINGKFSNWDDYQKWVESRHFSHKKENNLLETRNIFDSEQVEKFLARNLNDTRYASRLVLNTLQSFFANQETKVRVVNGSFTHTLRKKWGADLDKTRETHHHHAVDATLCAVTPFVKVSRYHYAVKEETGEKVMREIDFETGEIVDEMSYREFKKSKKYERKTYQVKWPNFREQLKPVNLHPRIKFSHQVDRKANRKLSDATIYSVREKTEVKTLKSGKQKITTDEYTIGKIKDIYTVDGWEAFKKKQDKLLMKDLDEKTYERLLSIAETTPDFQEVEEKNGKVKRVKRSPFAVYCEENDIPAIRKYAKNNNGPLIRSLKYYDGKLNKHINITKDSQGRPVEKTKNGRKVTLQSLKPYRYDIYQDLETKAYYTVQLYYSDLRFVEGKYGITEKEYMKKVAEQTKGQVVRFCFSLQKNDGLEIEWKDSQCYDVRFYNFQSANSINFKGLEQEMMPAENQFKQKPYNNGAINLNIAKYGKEGKKLRKFNTDILGKKHYLYYEKEPKNIIK

SEQ ID NO: 185 - protein, 1345 aa, Streptococcus anginosus
MDQKYSIGLDIGTNSVGWAVVTDDYKVPAKKMKVLGNTDKQSIKKNLLGALLFDSGETAEATRLKRTARRRYTRRRNRLRYLQEIFAEEMNKVDENFFQRLDDSFLVDEDKRGERHPIFGNIAAEVKYHDDFPTIYHLRKHLADISQKADLRLVYLALAHMIKFRGHFLIEGQLKAENTNVQALFKDFVEVYDKTVEESHLSEMTVDALSILTEKVSKSRRLENLIAHYPAEKKNTLFGNLIALSLGLQPNFKTNFQLSEDAKLQFSKDTYEEDLEGLLGEIGDEYADLFASAKNLYDAILLSGILTVDDNSTKAPLSASMVKRYEEHQKDLKKLKDFIKVNAPDQYNAIFKDKNKKGYAGYIENGVKQDEFYKYLKGILLQINGSGDFLDKIDREDFLRKQRTFDNGSIPHQIHLQEMHAILRRQEEHYPFLKENQDKIEKILTFRIPYYVGPLARKGSRFAWAEYKADEKITPWNFDDILDKEKSAEKFITRMTLNDLYLPEEKVLPKHSLLYETFTVYNELTKVKYVNEQGEAKFFDANMKQEIFDHVFKENRKVTKDKLLNYLNKEFEEFRIVNLTGLDKENKAFNSSLGTYHDLRKILDKSFLDDKANEKTIEDIIQTLTLFEDREMIRQRLQKYSDIFTKAQLKKLERRHYTGWGRLSYKLINGIRNKENKKTILDYLIDDGYANRNFMQLINDDALSFKEEIARAQIIGDVDDIANVVHDLPGSPAIKKGILQSVKIVDELVKVMGHNPANIIIEMARENQMTDKGRRNSQQRLKLLQDSLKNLDNPVNIKNVENQQLQNDRLFLYYIQNGKDMYTGETLDINNLSQYDIDHIIPQAFIKDNSLDNRVLTRSDKNRGKSDDVPSIEVVHEMKSFWSKLLSVKLITQRKFDNLTKAERGGLTEEDKAGFIKRQLVETRQITKHVAQILDERFNTEFDGNKRRIRNVKIITLKSNLVSNFRKEFELYKVREINDYHHAHDAYLNAVVGNALLLKYPQLEPEFVYGEYPKYNSYRSRKSATEKFLFYSNILRFFKKEDIQTNEDGEIAWNKEKHIKILRKVLSYPQVNIVKKTEEQTGGFSKESILPKGESDKLIPRKTKNSYWNPKKYGGFDSPVVAYSILVFADVEKGKSKKLRKVQDMVGITIMEKKRFEKHPVDFLEQRGYRNVRLEKIIKLPKYSLFELENKRRRLLASARELQKGNELVIPQRFTTLLYHSYQIEKNYEPEHREYVEKHKDEFKELLEYISVFSRKYVLADNNLTKIEMLFSKNKDAEVSSLAKSFISLLTFTAFGAPAAFNFFGENIDRKRYTSVTECLNATLIHQSITGLYETRIDLSKLGED

SEQ ID NO: 186 - protein, 849 aa, Listeria ivanovii
  misc_feature (780)..(780): Xaa can be any naturally occurring amino acid
LIDKNGTPQHITMIDKMRGKCTYFPEEVRIAKMSYTAELFGLLNDFNNIYFADPETGEKIGFTEADKKYFIDTFIHDQKGVKNITLKQIMKHKNIINETDIFGYRINTKNGTPIFTEFKGLKALKKALKEVDLPDEFYQNTEMMDEIANILSSEKSFTRREEQLKELFLAAFNDELEEAVKELINDITFKEFHSLSKKAIMVILPELWSTNQNQMQLFVQHKMDKSRLENLQNGTKIQFDDEAILSTIAKRAHRETIKIVDAVRAKYGELDYVIVEMAREKNSDEQKKVYNRAQKKQGDFEKEMCKLLGVSELKELRLNGKQHLALKFWKEQDGKCIYSGKPIALSDIVNNFNGLLEIDHIIPISISYDDSQQNKVLCLRSENQRKGQLSPYQYLIRGMGERSFDAFKAEVLSRHFGKKKQNYLLEMEDIANNDELRKHFINRNLVDTRYAMRTFSNTLKTFYTVNGIPTKVMPVNGAMTSALRKRAKLNKDRDAGHAHHAIDALIVAAIGRLPLIKQLAELRVNEEGEFADKITDKGLDDKTAFDDKTLKFLRNLLNYESKVKYSHKVDRKPNRSLSKQTLYSTREKDGEKYIIGKVKNIYTLDKAGYAALKKRIDKNPEDFLMAQHNPKTWEEIIKIMEVYSKADNPFKEFYDEHGFIMKDGKVPVKSLRYHDKKLGIHVPLTHKYENTRHDVVLLKRNSLRVDIYMNKEGVYKYQGVPYNWFNQKGDKYILDMEKYHNEIDGTRASFKNIDNTFEFQFSLYKNDVFSYMKKDKEGEXVSYTKLFRSDSSPRENRLEVENIDMRTSSQQMPTINPLKNLIKYNTDILGNTYPIQKEKFVTVFTLHSK

SEQ ID NO: 187 - protein, 1457 aa, Prevotella buccae
MKTILGLDLGTNSIGWAKVSVDDYGNYLHDIKLGSRIIPMSQDVLGNFDSGVTVSQTAQRTEFRSKRRLVQRNLQRRERLHRVLHVLDFLPAHYDAAIGWDRTEAVTYGKFLNHAEPKLAWEELGNGKRRFLFMDSFHEMVADFARCQPALVADGKKIPLDWTIYYLRKKALTQAITKEELAWILLNFNQKRGYYQLRGEEEEENPTKQEEYYELKVVSVEATDSRKGNDTWYNVHLENGWIYRRSSKISLDDWVGKVKQFIVTTEYEKDGATLKTDKEGYVKRSFRAPNENDWGLRKKRTETLLEMSGKTVGAFIYDHLLQEPADKIRGNFIRTIERHYYKAELEAILAEQCKYHIELRDKEMLEACARELYLNNLPHQRSLMKKDMTYLLLYDLIFYQRPLKSKKALIANCPYEYYEYVDKETGEIKRQNIKCIAKSNPYFQEFRLWQFVLNLRLFDRVEDKEVTANYLPTADDHARLFTYLNDRKEINQETLLKDYFKLKKVKIGNEKEYPIRWNYIEDKEKKYPCNETRYELLMALDRAGIEHKWLDDNNLEYRLWHLLYSVEVKSESETALRKLKNDDAFVNSFLKVKPFKKEYGAYSEKAIKRLLAVMRKGFLWNEQDICDETRKRIEIIIKGDVDEKVKERMGHAAYSFDRVSDFQGLPEWLACYVVYGRHSEAMDIQHWDSPERLMAYINNFKQYSLRNPIVEQCILETLRTVHDIWKETGQIDEIHVELGREMKSTSEERARRTQNVLRNENTNLRIKSLLIELKNDTDICNVHPYSPMQQEILRIYEEGALQELNREDEDFEEISKISQMSQPSGKELNRYKLWLEQKYRSPYTGKAISLAKLFTPAYQIEHVIPQSRYFDDSFTNKVICEAEVNTLKSNLLGYEFIKKHGGEIIHCTTLGDVRIFSESEYKAFVMDHYANNKSKKDKLLMEDIPQEFLSRQMNDSRYISKVVKTLLSNIVRMADESEATSKSVIVCTGGVTDRLKKDWGLNDVWNSIVYSRFERLNRLTGTEAFGHWENKDGKRVFQTSMPLELQRGFRKKRIDHRHHAMDALVIACASRNIVNYLNNESANNPKKREDLRRQLCDKNRVIRKPWETFTQDAYNALENVVVSFKNYVRVINKATNRYEHYDENGKKRFVQQKGSELWAIRKPMHKETYYGHVNLRRKELVTLQKALDDIPSICDKKLRDYISALVEKHFNKRQLLAHFKSTDYYWQKQYVNKVYVWTFSDDIKPLVATRKLLDTSFDAKRIGTITDTGIQKILRNYLEAKGGNATLAFTPEGIAEMNQNISKYNDGKPHQPILKVRITEPMGAKYRVGQTGNKMAKYVEAQSGTNLYFAIYEDSEGKRSYTTVPLDEVAERLKQRLSPVPEKDENDVPLKFYLSPNDLVYVPTEEELQLRECKLNKDRIYKMVSSTGNECHFIPYYVANVIYNKGGFNMQMHRPQS

SEQ ID NO: 188 - protein, 1330 aa, Enterococcus italicus
MKNDYTIGLDIGTNSVGYSVVTDDYKVISKKMNVFGNTEKKSIKKNFWGVRLFESGQTAQEARMKRTSRRRIARRKNRICYLQEIFQPEMNHLDNNFFYRLNESFLVADDAKYDKHPIFGTLDEEIHFHEQFPTIYHLRKYLADGDEKADLRLVYLAIAHIIKFRGNFLIEGELNTENNSVIELSKVFVQLYNQTLSELEGFQFIDESIDFSEVLTQQLSKSERADNVLKLFPDEKGTGIFAQFIKLIVGNQGNFKKVFQLEEDQKLQLSTDDYEENIENLLAIIGDEYGDIFVAAQNLYQAILLAGILTSTEKTRAKLSASMIQRYEEHAKDLKLLKRFVKEHIPDKYAEIFNDATKNGYAGYIDGKTKEEEFYKYLKTTLVQKSGYQYFIEKIEQENFLRKQRIYDNGVIPHQVHAEELRAILRKQEKYYSFLKENHEKIEQIFKVRIPYYVGPLAKHNEQSRFAWNIRKSDEPIRPWNMNDVVDENASAVAFIERMTIKDIYLNENVLPRHSLIYEKFTVFNELTKVLYADDRGVFQRFSAEEKEDIFEKLFKSERKVTKKKLENYLRIELSISSPSVKGIEEQFNANFGTYLDLKKFDELHPYLDDEKYQDTLEEVIKVLTVFEDRSMIQNQLEQLPLNLSTKTIKALSRRKYTGWGRLSARLIDGIHDKNSGKTILDYLIEDESDSYIVNRNFMQLINDDHLSFKKIIEDSQPYKEQQSAEEIVSELSGSPAIKKGILQSLKIVDELVAIMGYKPKNIVVEMARENQTTGRGKQNSKPRLKGIENGLKEFSDSVLKGSSIDNKQLQNDRLYLYYLQNGKDMYTGHELDIDHLSTYDIDHIIPQSFLTDNSIDNRVLTTSKSNRGKSDNVPSEEVVRKMDRFWRKLLNAKLISERKYTNLTKKELTESDKAGFLKRQLVETRQITKHVATILDSKFNEDSNNRDVQIITLKSALVSEFRKTFNLYKVREINDLHHAHDAYLNAVVALSLLRVYPQLKPEFVYGEYGKNSIHDQNKATIKKQFYSNITRYFASKDYIINDDGEILWNKQETIAQVIKTLGMHQVNVVKKVEIQKGGFSKESIQPKGESQKLIRRKQQWNTKKYGGFDSPVVAYAILLSFDKGKRKARSFKIVGITIQDRESFEGNPILYLSKKDYHNPKVEAILPKYSLFEFENGRRRMVASASETQKGNQLIIPGHLMELLYHSKKIINGKNSDSVSYIQNNKEKFREIFEYIVDFSSKYISADANLNKIEKIFENNFHKASEQEIAKSFINLLTFTAMGAPADFEFFGEKIPRKRYVSISEIIDAVFIHQSITGLYETRVRLTEV

SEQ ID NO: 189 - protein, 1123 aa, Mobiluncus curtisii
MFVYLNSPRGFGPATFLTDLPHFCIIFGNNDFMDNRKYHVGIDVGTNSVGFAAVEVGDSGSPIRFLNTMVVIHDSGVDPEQKKYAITRLASAGTARRTRRLYRTRRQRLRELDDFISNELGYPLVNLENFADPYEPWKVRADLATIKLPADELPEAMSIALRHMARHRGWRSPYQRVEALHLHAEISEEFSALKKRVMEKTGDVFSDDATPAEVLVDLMGRQKIRGADGMLSGKLRQSDNANELRKIASVQGIDDETLNRIIDRVFFSRSPKGKASERVGMDALPGQGSKPRALKAMPSFQKFRIVSVICNLRIKDSGDDNRPLSMEEKEQLIGYLMSSTTDDHVTWTDVAELLHVKRSNLQGTAKEGPDGERPYTRPPVNSAWSKIKDSKIKSLVALWKTGDVDVQSAIVEALSNASVLEDARPGADIVVAYLESLDDKELESLDKVGLPAGRASYSEDSLERLTERMLQDDCDLFEARKREFGVSDDWKPPADPIYAPVGNPGVDRVLKIVNRLLMAAEREWGAPTQINIEHVRSGFSSELMQREFERENERRRAQNEEAVKAILTEKGGNSHVSKYDIIRYYAVKRQNCQCLYCGTPITFSDCELDHIVPRKGVGSTNSRVNLAAACRSCNRDKSNLPFAVWAGKTSNFDVSIDGAVSRVKQWQRSQNEGAREFRAFQNEVISRLLKTTEDPEIDSRSLESVAWMARELHHRVEYYFQSKGAQTQVSVYRGAVTAQARKSSGLEDKVKMIGGGGKTRLDRRHHAMDAATIALMTPGISTTLSEKNNLRDAQKFTGQSETWKDYCGRTETAREHFAVWKSNMERLTDLFNDKLENDAIPVVQPLRLRLSDSKAHDDGIGKLDSKKLGSVWSLADIDRAATPQIWTALTRCDDFDPTKGLPENANRVIRAQGVKYESEDNIPVFPSNVAAIAVRDGYAEIGSTIHHARIYRIDDGKKIFYSMIRVFAVDLLKHQAEDLFTVKLPPSAISIRTCEDSLRRALSNGTAEYLGWLVPGDEIIVDTSDKAFHTGQIGDLLRNFPVNSFRLTGFPSNSRLRLKPVLLAGEGLRDDAEDSIKKILSGQGWRPAINVLFSKGKPRIVRRNSLGIERPSSNNGLPFSWEA

SEQ ID NO: 190 - protein, 1054 aa, Staphylococcus lugdunensis
MNQKFILGLDIGITSVGYGLIDYETKNIIDAGVRLFPEANVENNEGRRSKRGSRRLKRRRIHRLERVKKLLEDYNLLDQSQIPQSTNPYAIRVKGLSEALSKDELVIALLHIAKRRGIHKIDVIDSNDDVGNELSTKEQLNKNSKLLKDKFVCQIQLERMNEGQVRGEKNRFKTADIIKEIIQLLNVQKNFHQLDENFINKYIELVEMRREYFEGPGKGSPYGWEGDPKAWYETLMGHCTYFPDELRSVKYAYSADLFNALNDLNNLVIQRDGLSKLEYHEKYHIIENVFKQKKKPTLKQIANEINVNPEDIKGYRITKSGKPQFTEFKLYHDLKSVLFDQSILENEDVLDQIAEILTIYQDKDSIKSKLTELDILLNEEDKENIAQLTGYTGTHRLSLKCIRLVLEEQWYSSRNQMEIFTHLNIKPKKINLTAANKIPKAMIDEFILSPVVKRTFGQAINLINKIIEKYGVPEDIIIELARENNSKDKQKFINEMQKKNENTRKRINEIIGKYGNQNAKRLVEKIRLHDEQEGKCLYSLESIPLEDLLNNPNHYEVDHIIPRSVSFDNSYHNKVLVKQSENSKKSNLTPYQYFNSGKSKLSYNQFKQHILNLSKSQDRISKKKKEYLLEERDINKFEVQKEFINRNLVDTRYATRELTNYLKAYFSANNMNVKVKTINGSFTDYLRKVWKFKKERNHGYKHHAEDALIIANADFLFKENKKLKAVNSVLEKPEIESKQLDIQVDSEDNYSEMFIIPKQVQDIKDFRNFKYSHRVDKKPNRQLINDTLYSTRKKDNSTYIVQTIKDIYAKDNTTLKKQFDKSPEKFLMYQHDPRTFEKLEVIMKQYANEKNPLAKYHEETGEYLTKYSKKNNGPIVKSLKYIGNKLGSHLDVTHQFKSSTKKLVKLSIKPYRFDVYLTDKGYKFITISYLDVLKKDNYYYIPEQKYDKLKLGKAIDKNAKFIASFYKNDLIKLDGEIYKIIGVNSDTRNMIELDLPDIRYKEYCELNNIKGEPRIKKTIGKKVNSIEKLTTDVLGNVFTNTQYTKPQLLFKRGN

SEQ ID NO: 191 - protein, 586 aa, Pseudoramibacter alactolyticus
MTYYLGLDMGTGSVGWAATDKNYKLIRAKGKDLWGVRLFQTAKTAAERRSHRVARLRRQREKVRIGYLKTIFSDAINKVDPGFFQRLDDSFFYAEDKNINQPYALFADTGYTDVDYYRDYPTIFHLRSTLIHDTSPKDVRLVYLAVLNMFKHRGHFLASNLSENGVDDFGDIYQQWCKSVPKPVQISDPEAKTEKIENILSKAGISNTRRLEALLEVFGIKRRDAFAEVLKLWCGLKGNLSKIWSETDFSDLDNTKPALSFKDSNLDMVLSQLEEILPDEDYSWLMLTKQIYDWSLLSGMMKDASGKSYDYLSDARVASYQKHSEDLKTLKRFYHDNHLSAAYDQMFRVMGKDNYSAYAGSVQSKKEVVRRGASCGIEELYKRIKKDLKPVPDCETKQIILENIERGTFLPKQLTRDNGVIPNQIHVHELKAILKNAENYLPFLKEGSELTNSEKILQLFQFQIPYYVGPLYSDENNYAWVVRKEGGRVFPWNFAEKVDEKASAEGFISELVARCTYLDNEKVLPKASLLYEKFMVLNELNNLRINGERISVDIKQELYQNLFTRGKKVTLKKSEGLFGGQRIFCL

SEQ ID NO: 192 - protein, 1385 aa, Gemella morbillorum
MKNKTWYLGLGVGPTSIGWAATDSNYKLLRKNKKRLWGVRLFEEAKTAVDRRTFRAERRRLARRKWRISLLEELFAKEVSKNDPNFFLRLKESKYHFEDKSLMNEYILFNDKDYTDKDYYKEYPTIYHLRLSLTTEENPDIRKVYLAVHSMLKNRGHFLLQGQSFNDSNIDSVIKELLELETVKINFEVTDEVIHSLKKIALEKKNLSDKNNDVKKLYPKEKQLQEIFKLVFGGKTSLDKLYDIEEYKELDNSVKSISFKEKVYEEVRPDYEQILSNYIELLDLAKLVYDSIVLADIKKEGKTISESKVELYNKHKDDLANLKKLVKIDSKLSEDKKKEVYFTIFKEDKEKGTNYVNYTHRSQEGKSCSYEDFKKFLKKELEKLEDSPTKTTILEELDLETFLPLQRTKDNSVVPYQIHKEELVKILDNAAKYHSFLAEKDDSGYSTREKVVQLFEFRIPYYIGPLNAHHNTENGGYSWAIRKKGMESVPVTPWNFKDVIDESASAEAFVNNLKNKCAYLSGEDVLPKNSLLYSEYALLNELNALRYEGNRISVEARDVIVTKLFKEQGKKVTKKTIKELLKTEGFIDGKGEIVGIDNIVKNDLKSYRDFKKILADKFDKERVENIILWITLYGESRKLIKEKITKVYGDFYTVDEIEKMSRLTYKDWGILSRKLLTELVSEKLYNEETGECLNIIGAMRQGTILFMELLADKFDYMSQIKNHNKENKDDITEITPDILENLHASPAVKRSIWQTVRIVEELKTIIGCVPTKIFIETTKRNNAPYKVPTLNRNDLVTKYKTIREHEIFELEKELKNTLDFTLNKNRLINEEPSKLKATKLYLYYTQLGRCMYTGKKIDLGELFDNNNKYDIDHIYPQSKVKDGSFNNIVLVTKASNDMKADVFPLKSKFQTKENKIFWRFLKEKKLITEEKYNRLVRTEEFSNGELTGFITRQLVETSQAIKVISNVLRELNPETTICYSKAENVSSFRQSFGKIKEANRKAENNEKLIRVQEINDYYNAKDAYLSIVVGNVYDVKFTRNVHNFIKNNKDARRYSLNGLFYTDVKNANTIAWEMDKTVHVVEKTMNNNNILITRRTSEQKGALYDATLYKAKVAEKAKEGTYYPLKTTDSKIKDVGKYGGFTKIKIAYYSIFEYTLDGKKGKQKITRIVPIPIYISQNIKDDKALLEYAQTRLPGKDLKIKYRKLCIGSLVKINNFNYYIGGKTNNNFTFDSAVQVILDKDSESYIKELAKYLNWKKENKDGKLWESITEDKNIQLYDSLVKKMNTGIFIRKTPNKYTELLTLEVKNKFINIDIDEQVKLLLEILNLLTNKKFTSKLNEIGITASRGVCSFNLSNQSQFSIIEQSVTGVYEKEKLIIEKKKEGIL

SEQ ID NO: 193 - protein, 1029 aa, Alicycliphilus denitrificans
MRSLRYRLALDLGSTSLGWALFRLDACNRPTAVIKAGVRIFSDGRNPKDGSSLAVTRRAARAMRRRRDRLLKRKTRMQAKLVEHGFFPADAGKRKALEQLNPYALRAKGLQEALLPGEFARALFHINQRRGFKSNRKTDKKDNDSGVLKKAIGQLRQQMAEQGSRTVGEYLWTRLQQGQGVRARYREKPYTTEEGKKRIDKSYDLYIDRAMIEQEFDALWAAQAAFNPTLFHEAARADLKDTLLHQRPLRPVKPGRCTLLPEEERAPLALPSTQRFRIHQEVNHLRLLDENLREVALTLAQRDAVVTALETKAKLSFEQIRKLLKLSGSVQFNLEDAKRTELKGNATSAALARKELFGAAWSGFDEALQDEIVWQLVTEEGEGALIAWLQTHTGVDEARAQAIVDVSLPEGYGNLSRKALARIVPALRAAVITYDKAVQAAGFDHHSQLGFEYDASEVEDLVHPETGEIRSVFKQLPYYGKALQRHVAFGSGKPEDPDEKRYGKIANPTVHIGLNQVRMVVNALIRRYGRPTEVVIELARDLKQSREQKVEAQRRQADNQRRNARIRRSIAEVLGIGEERVRGSDIQKWICWEELSFDAADRRCPYSGVQISAAMLLSDEVEVEHILPFSKTLDDSLNNRTVAMRQANRIKRNRTPWDARAEFEAQGWSYEDILQRAERMPLRKRYRFAPDGYERWLGDDKDFLARALNDTRYLSRVAAEYLRLVCPGTRVIPGQLTALLRGKFGLNDVLGLDGEKNRNDHRHHAVDACVIGVTDQGLMQRFATASAQARGDGLTRLVDGMPMPWPTYRDHVERAVRHIWVSHRPDHGFEGAMMEETSYGIRKDGSIKQRRKADGSAGREISNLIRIHEATQPLRHGVSADGQPLAYKGYVGGSNYCIEITVNDKGKWEGEVISTFRAYGVVRAGGMGRLRNPHEGQNGRKLIMRLVIGDSVRLEVDGAERTMRIVKISGSNGQIFMAPIHEANVDARNTDKQDAFTYTSKYAGSLQKAKTRRVTISPIGEVRDPGFKG

SEQ ID NO: 194 - protein, 1422 aa, Sutterella wadsworthensis
MTQSERRFSCSIGIDMGAKYTGVFYALFDREELPTNLNSKAMTLVMPETGPRYVQAQRTAVRHRLRGQKRYTLARKLAFLVVDDMIKKQEKRLTDEEWKRGREALSGLLKRRGYSRPNADGEDLTPLENVRADVFAAHPAFSTYFSEVRSLAEQWEEFTANISNVEKFLGDPNIPADKEFIEFAVAEGLIDKTEKKAYQSALSTLRANANVLTGLRQMGHKPRSEYFKAIEADLKKDSRLAKINEAFGGAERLARLLGNLSNLQLRAERWYFNAPDIMKDRGWEPDRFKKTLVRAFKFFHPAKDQNKQHLELIKQIENSEDIIETLCTLDPNRTIPPYEDQNNRRPPLDQTLLLSPEKLTRQYGEIWKTWSARLTSAEPTLAPAAEILERSTDRKSRVAVNGHEPLPTLAYQLSYALQRAFDRSKALDPYALRALAAGSKSNKLTSARTALENCIGGQNVKTFLDCARRYYREADDAKVGLWFDNADGLLERSDLHPPMKKKILPLLVANILQTDETTGQKFLDEIWRKQIKGRETVASRCARIETVRKSFGGGFNIAYNTAQYREVNKLPRNAQDKELLTIRDRVAETADFIAANLGLSDEQKRKFANPFSLAQFYTLIETEVSGFSATTLAVHLENAWRMTIKDAVINGETVRAAQCSRLPAETARPFDGLVRRLVDRQAWEIAKRVSTDIQSKVDFSNGIVDVSIFVEENKFEFSASVADLKKNKRVKDKMLSEAEKLETRWLIKNERIKKASRGTCPYTGDRLAEGGEIDHILPRSLIKDARGIVFNAEPNLIYASSRGNQLKKNQRYSLSDLKANYRNEIFKTSNIAAITAEIEDVVTKLQQTHRLKFFDLLNEHEQDCVRHALFLDDGSEARDAVLELLATQRRTRVNGTQIWMIKNLANKIREELQNWCKTTNNRLHFQAAATNVSDAKNLRLKLAQNQPDFEKPDIQPIASHSIDALCSFAVGSADAERDQNGFDYLDGKTVLGLYPQSCEVIHLQAKPQEEKSHFDSVAIFKEGIYAEQFLPIFTLNEKIWIGYETLNAKGERCGAIEVSGKQPKELLEMLAPFFNKPVGDLSAHATYRILKKPAYEFLAKAALQPLSAEEKRLAALLDALRYCTSRKSLMSLFMAANGKSLKKREDVLKPKLFQLKVELKGEKSFKLNGSLTLPVKQDWLRICDSPELADAFGKPCSADELTSKLARIWKRPVMRDLAHAPVRREFSLPAIDNPSGGFRIRRTNLFGNELYQVHAINAKKYRGFASAGSNVDWSKGILFNELQHENLTECGGRFITSADVTPMSEWRKVVAEDNLSIWIAPGTEGRRYVRVETTFIQASHWFEQSVENWAITSPLSLPASFKVDKPAEFQKAVGTELSELLGQPRSEIFIENVGNAKHIRFWYIVVSSNKKMNESYNNVSKS

SEQ ID NO: 195 - protein, 1132 aa, Nitratifractor salsuginis
MKKILGVDLGITSFGYAILQETGKDLYRCLDNSVVMRNNPYDEKSGESSQSIRSTQKSMRRLIEKRKKRIRCVAQTMERYGILDYSETMKINDPKNNPIKNRWQLRAVDAWKRPLSPQELFAIFAHMAKHRGYKSIATEDLIYELELELGLNDPEKESEKKADERRQVYNALRHLEELRKKYGGETIAQTIHRAVEAGDLRSYRNHDDYEKMIRREDIEEEIEKVLLRQAELGALGLPEEQVSELIDELKACITDQEMPTIDESLFGKCTFYKDELAAPAYSYLYDLYRLYKKLADLNIDGYEVTQEDREKVIEWVEKKIAQGKNLKKITHKDLRKILGLAPEQKIFGVEDERIVKGKKEPRTFVPFFFLADIAKFKELFASIQKHPDALQIFRELAEILQRSKTPQEALDRLRALMAGKGIDTDDRELLELFKNKRSGTRELSHRYILEALPLFLEGYDEKEVQRILGFDDREDYSRYPKSLRHLHLREGNLFEKEENPINNHAVKSLASWALGLIADLSWRYGPFDEIILETTRDALPEKIRKEIDKAMREREKALDKIIGKYKKEFPSIDKRLARKIQLWERQKGLDLYSGKVINLSQLLDGSADIEHIVPQSLGGLSTDYNTIVTLKSVNAAKGNRLPGDWLAGNPDYRERIGMLSEKGLIDWKKRKNLLAQSLDEIYTENTHSKGIRATSYLEALVAQVLKRYYPFPDPELRKNGIGVRMIPGKVTSKTRSLLGIKSKSRETNFHHAEDALILSTLTRGWQNRLHRMLRDNYGKSEAELKELWKKYMPHIEGLTLADYIDEAFRRFMSKGEESLFYRDMFDTIRSISYWVDKKPLSASSHKETVYSSRHEVPTLRKNILEAFDSLNVIKDRHKLTTEEFMKRYDKEIRQKLWLHRIGNTNDESYRAVEERATQIAQILTRYQLMDAQNDKEIDEKFQQALKELITSPIEVTGKLLRKMRFVYDKLNAMQIDRGLVETDKNMLGIHISKGPNEKLIFRRMDVNNAHELQKERSGILCYLNEMLFIFNKKGLIHYGCLRSYLEKGQGSKYIALFNPRFPANPKAQPSKFTSDSKIKQVGIGSATGIIKAHLDLDGHVRSYEVFGTLPEGSIEWFKEESGYGRVEDDPHH

SEQ ID NO: 196 - protein, 1327 aa, Solobacterium moorei
MEGQMKNNGNNLQQGNYYLGLDVGTSSVGWAVTDTDYNVLKFRGKSMWGARLFDEASTAEERRTHRGNRRRLARRKYRLLLLEQLFEKEIRKIDDNFFVRLHESNLWADDKSKPSKFLLFNDTNFTDKDYLKKYPTIYHLRSDLIHNSTEHDIRLVFLALHHLIKYRGHFIYDNSANGDVKTLDEAVSDFEEYLNENDIEFNIENKKEFINVLSDKHLTKKEKKISLKKLYGDITDSENINISVLIEMLSGSSISLSNLFKDIEFDGKQNLSLDSDIEETLNDVVDILGDNIDLLIHAKEVYDIAVLTSSLGKHKYLCDAKVELFEKNKKDLMILKKYIKKNHPEDYKKIFSSPTEKKNYAAYSQTNSKNVCSQEEFCLFIKPYIRDMVKSENEDEVRIAKEVEDKSFLTKLKGTNNSVVPYQIHERELNQILKNIVAYLPFMNDEQEDISVVDKIKLIFKFKIPYYVGPLNTKSTRSWVYRSDEKIYPWNFSNVIDLDKTAHEFMNRLIGRCTYTNDPVLPMDSLLYSKYNVLNEINPIKVNGKAIPVEVKQAIYTDLFENSKKKVTRKSIYIYLLKNGYIEKEDIVSGIDIEIKSKLKSHHDFTQIVQENKCTPEEIERIIKGILVYSDDKSMLRRWLKNNIKGLSENDVKYLAKLNYKEWGRLSKTLLTDIYTINPEDGEACSILDIMWNTNATLMEILSNEKYQFKQNIENYKAENYDEKQNLHEELDDMYISPAARRSIWQALRIVDEIVDIKKSAPKKIFIEMAREKKSAMKKKRTESRKDTLLELYKSCKSQADGFYDEELFEKLSNESNSRLRRDQLYLYYTQMGRSMYTGKRIDFDKLINDKNTYDIDHIYPRSKIKDDSITNRVLVEKDINGEKTDIYPISEDIRQKMQPFWKILKEKGLINEEKYKRLTRNYELTDEELSSFVARQLVETQQSTKALATLLKKEYPSAKIVYSKAGNVSEFRNRKDKELPKFREINDLHHAKDAYLNIVVGNVYDTKFTEKFFNNIRNENYSLKRVFDFSVPGAWDAKGSTFNTIKKYMAKNNPIIAFAPYEVKGELFDQQIVPKGKGQFPIKQGKDIEKYGGYNKLSSAFLFAVEYKGKKARERSLETVYIKDVELYLQDPIKYCESVLGLKEPQIIKPKILMGSLFSINNKKLVVTGRSGKQYVCHHIYQLSINDEDSQYLKNIAKYLQEEPDGNIERQNILNITSVNNIKLFDVLCTKFNSNTYEIILNSLKNDVNEGREKFSELDILEQCNILLQLLKAFKCNRESSNLEKLNNKKQAGVIVIPHLFTKCSVFKVIHQSITGLFEKEMDLLK

SEQ ID NO: 197 - protein, 738 aa, Treponema phagedenis
MLQELFAKEIAKIDEGFFRRLDESAFYLEDKSLKQKYSLFNDDNFTDKDYYKKFPTIHHLIKALINDETHVDIRLLYLACHTIIKNRGHFLFEGKEFNTESRFDDAINELFSYLRQDMEIDFAFEDKIADIKEILENKKIGMRDKQNALNKKLSIAPKDKQKKEIIKLIVGASFNLKTLFNDEKYSSEKESYSFAKSNYEEKEAVLESLLGDGFGLILRAKAVYDSSVLSEILGNETYLSFAKVKIYDKHKEDLAKLKKVIKTYHADEFKKVFAEANIQGNYCSYVGSCKKNGKKVPIEKRADKDAFYDFLKKILKDEKAKNSDADYAFILNEIELKTFLPKQVSKKNANIPYQLRRMELEKIVNNAEKYFSFLSEKDEYGTVKEKIIQLLTFKRPYYIGIIQDTHKEKFPDRCWVVKKENAKNEKITPWNFYDHIDEDKTAEAFITSRTNKCTYLIGEDVLPRNSLLYMEYTVLNELNNLKVSVDGVNIFDVKLKKKIYEQVFKQRKEVSKKTIADFLKKEGICKKENDVVITGIDEKCTTSLKLYIDIKKIIGKRIEEEPTKNALEDIILWASIYDEGEGRKILEAKIQSVYPDVFTQDELNKILKLKISGWGRFSRKFLESIVASFPGFTDTINIITAMRETNFNLMELLGDAYGFSKGIEKFNSKFNDDKKVFSYDKLVKDLYLSPSVKRMLWRALVIVKEVKSIMGKDPKKYLLKWQEEKKLKREGLPPAMQV

SEQ ID NO: 198 - protein, 1377 aa, Streptococcus equinus
MEKTYSIGLDIGTNSVGWAVITDDYKVPAKKMKVLGNTDKKYIKKNLLGALLFDSGETAEATRLKRAARRRYTRRKNRLRYLQEIFAKEMAKVDESFFQRLEESFLTDDDKTFDSHPIFGNKAEEDTYHQEFPTIYHLRKHLADSPEKVDLRLVYLALAHMIKFRGHFLIEGQLNAENTDVQKIFADFVGVYDRTFDDSHLSEITVDAASILTEKISKSRRLENLIKQYPTEKKNTLFGNLVALALGLQPNFKTNFKLSEDAKLQFSKDTYDEDLEELLGKIGDDYADLFTAAKNLYDAILLSGILTVDDNSTKAPLSASMIKRYEEHHEDLEKLKTFIKVNNFDKYHEIFKDKSKNGYAGYIENGVKQDIFYKHLKSIISEKNGGQYFLDKIEREDFLRKQRTFDNGSIPYQIHLQEMRTILRRQGEYYPFLKENQAKIEKILTFRIPYYVGPLARKNSRFAWAKYHSDEPITPWNFDEVVDKEKSAEKFITRMTLNDLYLPEEKVLPKHSYVYETFAVYNELTKIKYVNEQGKSFFFDANMKQEIFDHVFKENRKVTKAKLLSYLNNEFEEFRINDLIGLDKDSKSFNASLGTYHDLKKILDKSFLDDKTNEQIIEDIVLTLTLFEDRDMIHERLQKYSDIFTSQQLKKLERRHYTGWGRLSYKLINGIRNKENNKTILDFLIDDGDANRNFMQLINDDSLSFKTTIQEAQVVGDVDDIEAVVHDLPGSPAIKKGILQSVKIVDELVKVMGHNPQNIVIEMARENQITGYGRNRSNQRLKRLQDSLKEFGSDILSKKKPSYVDSKVENSHLQNDRLFLYYIQNGKDMYTGEELDIDHLSDYDIDHIIPQAFIKDNSIDNRVLTSSAKNRGKSDDVPSIEIVRNRKSYWYKLYKSGLISKRKFDNLTKAERGGLTETDKAGFIKRQLVETRQITKHVAQILDARFNTKCDENDKVIRDVKVITLKSSLVSQFRKEFKFYKVREINDYHHAHDAYLNAVVGTALLKKYPKLAPEFVYGEYKKYDVRKLVAKSSDNHSELGKATAKYFFYSNLMNFFKTEVKYADGRVFERPDIETNADGEVVWNKQRDFNIVRKVLSYPQVNIVKKVEVQTGGFSKESILPKGDSDKLIPRKTKKLQWETQKYGGFDSPTVAYSVLVVADVEKGKTRKLKTVKELVGISIMERSSFEENPVSFLEKKGYHNVQEDKLIKLPKYSLFEFEGGRRRLLASATELQKGNEVVLPQYMVNLLYHSQHVNNSHKPEHLNYVKQHKDEFKDIFNLIISIARINILKPKVVDNLINEFTEYGQEDISSLSESFINLLKFISFGAPGAFKFLKLDVKQSNLRYKSTTEALSATLIHQSVTGLYETRIDLSKLGEE

SEQ ID NO: 199 - protein, 1128 aa, Streptococcus vestibularis
MSDLVLGLDIGIGSVGVGILNKVTGEIIHKNSRIFPAAQAENNVERRTNRQGRRLTRRKKHRRVRLNHLFEESGLITDFTKVSINLNPYQLRVKGLIDELSNEELFIALKNMVKHRGISYLDDASDDGNSSVGDYAQIVKENSKQLETKTPGQIQLERYQKYGQLRGDFTVEEDGKKHRLINVFPTSAYRSEALRILQTQKEFNPQITDEFINRYLEILTGKRKYYHGPGNEKSRTDYGRYTTKKDSENEYITLDNIFGILIGKCTFYPEEYRAAKASYTAQEFNLLNDLNNLTVPTETKKLSEEQKNQIINYVKNEKAMGPAKLFKYIAKLLSCDVADIKGYRIDKSDKAEIHTFEAYRKMKTLETIDFEKMSRDQLDKLAYVLTLNTEREGIQEALDHEFADGNFSQEQIDELVQFRKANSSIFGKGWHNFSVKLMMELIPELYATSEEQMTILTRLGKQKTTSSSNKTKYIDEKLLTEEIYNPVVAKSVRQAIKIVNAAIKEYGDFDNIVIEMARETNEDDEKKAIQKIQKANKDEKDAAMLKAANQYNGRAELPHSVFHGHKQLATKIRLWHQQGERCLYTGKTISIHDLINNPNQFEIDHILPLSITFDDSLANKVLVYATANQEKGQRTPYQALDSMDDAWSFRELKAFVRESKSLSNKKKEYLLTEEDISRFDVRKKFIERNLVDTRYASRVVLNALQEHFRAHKTDTKVSVVRGQFTSQLRRHWGIEKTRDTYHHHAVDALIIAASSQLNLWKKQKNTLVNYSENQLLDIETGELISDDEYKESVFKAPYQHFVDTLKSKEFEDSILFSYQVDSKFNRKISDATIYATRQAKVGKDKKDETYVLGKIKDIYSQTGYDAFIKIYQKDKSKFLMYRHDPQTFEKVIEPILENYPNKEMNEKGKEVPCNPFLKYKEEHGDYIRKYSKKGNGPEIKSLKYYDSKLGNHIDITPKDSNNKVVLQSVSPWRADVYFNKTTGKYEILGLKYADLQFEKGTGTYKISQEKYNVIKKKEGVDSDSEFKFTLYKNDLLLIKDTETKEQQLFRFLSRTKPNVKHYVELKPYDKQKFEGNESLINVLGAVAKGGQCQKGINKPNISIYKVRTDVLGNQHIIKNEGDKPKLDF

SEQ ID NO: 200 - protein, 1080 aa, Methylocystis sp.
MRVLGLDGGIASIGWALIEIFEDHEPSDGRIIDTGAWMFDAPEEKSQTGTKLKSELRRIFRGQRRVIRRRRQRMNEVRRILHRHGLLSSDNRDALKQPGLDPWKIRAEGIDRLLSPIEFAVALGHIARHRGFKSNSKGAKTSDLDAESSRMKKAVGETREKLARFGSPAKLLVEDEGFVLRQTKLKSGALETVRRFRNRDGDYSRSLLRDDLAAEVRALFRAQARLQSTFAKVELEAEFTQAAFFQRPLQDSERLVGPCPFEPAEKRSPKRGYSFELFRFLSRLNHLTLREGSEERTLTVEELRTAAADFGGVAKFTFSTLRKRLALPDIAIFVGIKADDEKKLDVVARSGEAATGTARLRRVVIDALGELAWGALISAPERLDKITEIITFRSDLDRIRAGLIEAGFDTPLIEAIVRAAADGKLDAFTGVGHISAKAARNIIPGLMRGMTYDKACAAAGYDHTASRERDAFDVGMHGKEALKKILQEERISRELVGSPSARKALIEAVKQVKAIIEKYGVPDRIHVELARDVGKSIEERRDIHFGIEKRSRQKDKLRELFGKEVGHLPQDGERGKEELLRFELWNEQMGRCLYTDEYINPKQLVASDNSVQVDHILPWSRFGDDSYLNKTLCTAKANQDKKGRTPYEWFRADKPEAEWDAFVARVESIQFMKGLKKRNYKLKNAEEAAEKFRSRNLNDTRWTCRLLAEALKQLYPKGEKDKDGKERRRVFTRPGALTNRLRRAWSLQRRKKSEKGERIADDRHHALDAIIVAATTESLLIRATREVQDIERKGLHYDLTKNITQPWPGFADEALDAVEKVFVARAERRRARGKAHDATIRHIAVRDDEAKVYERKKVGDIKLGDLIRVKDAERNAPLIENLRKWIEAGSPRDNPPLSPKGDPVSKVRLVTKNKVNITLDTGNPERLATVDRGEMARVDVFRKANRKGKYEYYLVPIYPHEIATMETPPMRAVQGGGDDDKWPEIDSTFEFLWSINQLSLLELTKPDGEVIRSYFRSLDRNTGALTVSGIANSTATRKGIGTRTLIDFKKLHVDRLGQIFEVERELRTWRGETWRGKDCI

SEQ ID NO: 201 - protein, 1087 aa, Phascolarctobacterium succinatutens
MLRMKYAIGLDIGIASVGYAVLALDHEENPWGIIRLGSRIFDVAENPKDGASLALPRREARSVRRRLRRHHHRLERIKNLLINTEFITKDELLHLYDGNLSDVYELRVKALDYSVTNAELTRILLHLAQRRGFKSNRKSDANDKEAGQLLEAVSANAKRMQENHYRTVGEMFYKDDLFSKYKRNKGGTYLTTVHRDMIAAEARTILEKQFALGNNICTQDFIDKYLSILLSQRQFDEGPGEPSPYAGNQIANMIGKCTFEPNEYRAAKASYSFERFNLLQKVNHLRLLLEGKSIALDNEQRKKIIALAHDKADLRYSHIRKALGLDEKVLFNTITYNDDVSVIEKKTKFNFLQAYHQIKKVLAEDMQKLTTEQLDNIGQILSTYKSDNKRTEELSALGLEKKIIDALLGINGLSKFAHLSLKALRKINPYLEEGKIYNEACTAAGYDFKAHANTQKTELLPAYKEEMDDITSPVARRAIAQSIKVINAIIREQKGSPLYINIELAREMAKGFDERTQIDKANKENQAKNERIMERIRTEFHKANPTGMDLIKLKLWEEQDGRSPYSQKAISINRLFEPGYVDIDHIVPYSISFDDSFKNKVLVFSDENRDKGNRLPIAYLQSKFGAKAAENFMIWVQSNIKDYKKRQKLLKREITEEDINKFKERNLQDTKTISRFLYNYINDYLLFAPSDTGKKKRVTAVNGTITAYLRKRWGINKIRANGDKHHAVDAVVIACTTDKMIKDLSSFSRYHELEYTHTDTESFLVNSLTGEILKRFPYPWEDFRPELMARLSDNPADALRKLNLIFYHGIDLSTIKPIFVSRMPRHKVTGAAHKATIKSARCLDNGIVICKTSLQNLKLDKEGEIANYYAPESDTILYNALKERLRSYDNKPAKAFAEPFYKPKADGTPGPLVKKVKVYEKSTLNVAVQQNTAVADNDSMVRVDVFHVKGNGYYLVPIYIADTLKKELPNKAIVAYKPYADWPVMDDSNFIFSLYPNDLIKFEHKNSVKFAKVNKESTLNDFYSTKSEIVYFKGCNINTGAITIINHENTYVVSSLGVKTLPSLEKYQADVLGNYTKVKKEVRKPFR

SEQ ID NO: 202 - protein, 1375 aa, Lactobacillus ruminis
MRKNQEPYNIGLDIGTSSIGWSIMNDNFDLMRVKGKKGIGVRLYNEGQSAAERRMHRTARRRYGRRKWRLRLLEDFFDEHMAEVDDTFFARLKDSNISPKDDKKYRKSLLFPKSKGVTYQDDGEFYKKYPTMYHLRYALMTEHRKFDLREIYLAFHHMVKYRGNFLYDTSVDSFEAKNLDIKGKFDEINDLLSSYTDFYVDNSNAALVESILLEKNTTRKDKSKKIAKLLHVEDKEKGKNKKAKDLATQISNAVLGLKCNFHLIFELQQKYSFDLCSEKTEENIAKLSEVLDENQKMLLMILKEVQDQVMLNAFVPSGMSLSEAMMQKYDDYGEQLKIYHELEHSVSDDSAAKLRGAYRDYNDNIIKRIDGDNKKDTFYKRVKNILTKISKEYVDQDVLESCGKLKKLIDENKLFIRQRTAANGVLPHQLHQIEMRKIIDNQKEYYPWLAEPNPNEKRRVYSKYKVEELIAFRIPYYVGPLVDPNNADKNKEARFSWMVRKKDGEITPWNFYDKVDWAESANNFIERMKSKDTYLLGEDVVPKESMLYQKYEVLNELNNLRINDSGLSDSFEDVKLKQAIYNDLFKKQKIVKITDLQNYLVQNHKYLVKPKISGLADENRFLSSLSTYSDLKTIFGDKVDDRTYFNDFEKMVEYSTVFEDGHDYNQKLDEYTWLTKEEKYKIGKKRYRGWGKLSKKLLTGLRDKNNHTIMDNLWETNRNFMQIQTADEFSKQIAEENERHLKGSVSDAINDMYTSPANKKAIRQVLRVVDDIQKAMGYAPSSISLEFAREDGPSVRTVSRANRMKSIYEKYASEVSEEVMKDLDGVIKDKKGLNDRLYLYFEQQGKDMYSGHPLDFDKVISGQEYDIDHILPQAVIKDDSLDNRVLTTKALNNDVKSKGVPCRMFNGMHSFWKNLYDKGFISRRKFNNLTTNPENIDKYKMKGFVNRQLVETRQIIKLVANVLNDKYQNDDVDIIEVRAELTHDVRKHFKFYKNRNVNDYHHAFDAYLTSFIGHYLFKKYPNLRPLFDYNDFMKVSDNVFKQLRGNNFLGEFLNKTGDIISTDGNFVLNKEEMINKLNKAYAFKKILVTKEVGQRTGAMFNETRYPAPNSRKAALKYRRMPKPDSLISVKDYKNTDIYGGYSGKNDAYMVIVDMGKQYMVVGVPVRYTEKLDKLRIKHSELYRDELRKVLSRDKTLLDSKGNVKRFDIVLDRVLYGQLIEDGNELFTLGSSKYKRNFRQLFLDKQCIEILDSSATPQPTDEELIWVYDQILDKVDKYFELYDINRQRETLRKGRAAFCSLPNISMKKDDVTKKKILNEILVALHANESESNCEKIGKKVFGRLQVPGGIKLSKEAKLIYQSPTGLFERVVYLKDL

SEQ ID NO: 203 - protein, 1391 aa, Prevotella oralis
MKKILGLDLGTTSIGWALVNEKENNEELSSIIRLGVRVNPLTVDEKSNFEKGKDITTNADRTKCRSARRNLQRFKLRREALADCLKRHGLMTDETPLCETNNSIIFKTYSNRAKAVCEKIALDDFVRVLFMINKKRGYKSSRKLNTDDEGTLVDGMDVAKLLYNEQITPGEYLLRLFKKGKKTRPDFYLSDLKAELERIWDFQRTFYPEILCNALKEDLKGKSRTQSSAIFYAKYKVSTAKIAGKDKRLQELTWRTDALRKQLTIDEVAYVICSINGEVNGSSQRLSMISDRSKLLYFNHQTIGQYLMQRLEENPNAGLKNIIFYRQDYEDEFNDIWNSQATYHKELTPELKKEVKDIIFYQRGLKSCKWLINYCELEHEEIEVKTPEGKLRKITIGSKTCPKSSPLFQEFKIWQVLNNLQVSPLNSRRKAKRKKDEEPSLFSDEDMNTACRYLNEEEKLTLFKELSIKKELKKKDALKLLFENYKELDLNYKVISGNVTMANLYRAFQDIISLTGNGEFDFQAMPAEEAEKTVEEIFGGLGYKTAFLHFDASLHDKEFERQPAYRLWHLLYSYAGDQSKTGIEALVKRIQELCGFEPEYARILANISFIPDYGNLSSKAMRKILPYMQDGYEYSEACSKAGYRHSASSLTKEEINKKNYKTHLDEIKRNSLRNPIVEKILNQMVNVVNSVIDTYSNIDEIRIEMARELKKSKPEREDMSFAISKATKETERIKGILEQEFKIQHVTRNDIIRYRLYEELKPNGYKTLYSNTYIPREDLFSKKFDIEHIIPKARLFDDSYSNKTLELRDINIEKGNQTAYDFVLSKYGEEGLYKYEQRVEEFKKNNEQAGTKCRKLLMREADIPSDFLNRDLNDSQYIAKKAHELLREIVPTVTATTGSITNRLREDWKLVNVMKELNWEKYDKLGLTEEYKDKDGNTVRHIKDWTKRNDHRHHAMDALTIAFTKPSFIQYLNNLNARSNRGGSIYGIEQKELERENNKLVFIPPIDPKIFRKQAKEHLSNILISIKAKNKVVTKNVNKTKSKSGTNRKVQLTPRGQLHLETVYGKIRTYKTEEIKVGTKLTEELIAKVADKKIREALMQRLSEYGGNIKKAFQNISKHPIWLNGSHTKHVPEKVKIVFFEDVFTIRKAITPDIKIDKVIDSKIRRILQERLNEFGGEASKAFSNLDENPIWFNRDKGIAIKSVKIRGIAKGTAIRVKKDIHGKTIIGNNGYPVANDYVNTGNNHHVAIFRDKDGNLQEHIVSFYEATARAIQNLPIVDRNYNSEKDWKFLFSMKQNEYFVFPNPNTGFNPSEISLKDEKNYALISPNLFRVQKLSHYYYVFRHHLETNVDTNLQLKDITWKRITAVNNLTGAVKVRIDHLGRIVDVGEYK

SEQ ID NO: 204 - protein, 1167 aa, Streptococcus sanguinis
MLFGLKTKFKDCFELEEEPDLNFSKENYDDNLEKLLGELGEDFSDVFDKLKILRDTILLSGMLTYTGATHARFSATMVERYEEHRKDLQRFKSFIKQNLSEQDYLDIFGRKTQNGFDVDKETKGYVGYITNKMVLTNPQKQKTIQQNFYDYISGKITGIEGSEYFLNKISDRTFLRKLRTSDNGAIPNQIHAYELEKIIERQGKDYPFLLENKDKLLSILTFKIPYYVGPLAKGNNSRFAWIKRANSSDILDDNDEDTRNGKIRPWNYHKLINMDETRDAFITNLIGNDTILLNEKVLPKRSLIYEEVMLQNELTRVKYKDKYGKAHFFDSEHRQNIINGLFKINSKRVNAERLIKYLSDNHKDLNAIEIVSGVEKGKSFNSTLKTYNDFKTIFSEEFLDSEIYQKELEEIIKVITVFDDKKSIKNYLTKYFGHLEFLDEEKINQLSKLRYTGWGRYSAKLLLDIRDEDTGFNLLQFLRNDEENRNLTNLISDNTLSFDPKIKAIQSKSTVEDDVFDEIKKLAGSPAIKRGILNSIKIVDELVQIIGYPPQNIVIEMARENMTTEEGQKKTKTRKSKLESALKNIENSVLENGKVLHSDEQLQSEKLYLYYLQNGKDIYSLDETGSPAPIYLDQLDQYEVDHIIPYSFLPIDSIDNKVLTHRKNNQRKLDNIPDKETVAHMKPFWEALYNAKLISQTKYQRLTTSERTPDGVLTESMKAGFIERQLVETRQIIKHVARILDNRFSDTKIITLKSQLVTNFRNTFHIAKIRELNDYHHAHDAYLAVVVGQTLLKAYPKLAPELIYGHHVHFNRHEENKATLRKHLYSNIMRFFNNPDSKVSKDIWDCNRDLPIIKHVIYNSQINFVKRTMIKKGAFYNQNPVGKFNKQLAANNRYPLKTKALCLDTSIYGGYGPMNSTLSIIIIAERFNEKKGKIETVKEFHDIFIIDYEKFNNNPFQFLNDTSENGFLKKNNINRVLGFYRIPKYSLMQKIDGTRMLFESKLNLHKATQFKLTKTQNELFFHMKRLLTNSNLMDLKSESAIKESQNFILKHKEEFDNISNQLSAFSQKMLGNTTSLKNLIKGYNERKIKEIDIREETIKYFYDNFIKMFSFVKSGAPKDINDFFDNKYTVARMRPKPDKRLLNATLIHQSITGLYETRIDLSKLGED

SEQ ID NO: 205 - protein, 1334 aa, Staphylococcus pseudintermedius
MGRKPYILSLDIGTGSVGYACMDKGFNVLKYHDKDALGVYLFDGALTAQERRQFRTSRRRKNRRIKRLGLLQELLAPLVQNPNFYQFQRQFAWKNDNMDFKNKSLSEVLSFLGYESKKYPTIYHLQEALLLKDEKFDPELIYMALYHLVKYRGHFLFDHLKIENLTNNDNMHDFVELIETYENLNNIKLNLDYEKTKVIYEILKDNEMTKNDRAKRVKNMEKKLEQFSIMLLGLKFNEGKLFNHADNAEELKGANQSHTFADNYEENLTPFLTVEQSEFIERANKIYLSLTLQDILKGKKSMAMSKVAAYDKFRNELKQVKDIVYKADSTRTQFKKIFVSSKKSLKQYDATPNDQTFSSLCLFDQYLIRPKKQYSLLIKELKKIIPQDSELYFEAENDTLLKVLNTTDNASIPMQINLYEAETILRNQQKYHAEITDEMIEKVLSLIQFRIPYYVGPLVNDHTASKFGWMERKSNESIKPWNFDEVVDRSKSATQFIRRMTNKCSYLINEDVLPKNSLLYQEMEVLNELNATQIRLQTDPKNRKYRMMPQIKLFAVEHIFKKYKTVSHSKFLEIMLNSNHRENFMNHGEKLSIFGTQDDKKFASKLSSYQDMTKIFGDIEGKRAQIEEIIQWITIFEDKKILVQKLKECYPELTSKQINQLKKLNYSGWGRLSEKLLTHAYQGHSIIELLRHSDENFMEILTNDVYGFQNFIKEENQVQSNKIQHQDIANLTTSPALKKGIWSTIKLVRELTSIFGEPEKIIMEFATEDQQKGKKQKSRKQLWDDNIKKNKLKSVDEYKYIIDVANKLNNEQLQQEKLWLYLSQNGKCMYSGQSIDLDALLSPNATKHYEVDHIFPRSFIKDDSIDNKVLVIKKMNQTKGDQVPLQFIQQPYERIAYWKSLNKAGLISDSKLHKLMKPEFTAMDKEGFIQRQLVETRQISVHVRDFLKEEYPNTKVIPMKAKMVSEFRKKFDIPKIRQMNDAHHAIDAYLNGVVYHGAQLAYPNVDLFDFNFKWEKVREKWKALGEFNTKQKSRELFFFKKLEKMEVSQGERLISKIKLDMNHFKINYSRKLANIPQQFYNQTAVSPKTAELKYESNKSNEVVYKGLTPYQTYVVAIKSVNKKGKEKMEYQMIDHYVFDFYKFQNGNEKELALYLAQRENKDEVLDAQIVYSLNKGDLLYINNHPCYFVSRKEVINAKQFELTVEQQLSLYNVMNNKETNVEKLLIEYDFIAEKVINEYHHYLNSKLKEKRVRTFFSESNQTHEDFIKALDELFKVVTASATRSDKIGSRKNSMTHRAFLGKGKDVKIAYTSISGLKTTKPKSLFKLAESRNEL

SEQ ID NO: 206 - protein, 1156 aa, Ruminococcus albus
MGNYYLGLDVGIGSIGWAVINIEKKRIEDFNVRIFKSGEIQEKNRNSRASQQCRRSRGLRRLYRRKSHRKLRLKNYLSIIGLTTSEKIDYYYETADNNVIQLRNKGLSEKLTPEEIAACLIHICNNRGYKDFYEVNVEDIEDPDERNEYKEEHDSIVLISNLMNEGGYCTPAEMICNCREFDEPNSVYRKFHNSAASKNHYLITRHMLVKEVDLILENQSKYYGILDDKTIAKIKDIIFAQRDFEIGPGKNERFRRFTGYLDSIGKCQFFKDQERGSRFTVIADIYAFVNVLSQYTYTNNRGESVFDTSFANDLINSALKNGSMDKRELKAIAKSYHIDISDKNSDTSLTKCFKYIKVVKPLFEKYGYDWDKLIENYTDTDNNVLNRIGIVLSQAQTPKRRREKLKALNIGLDDGLINELTKLKLSGTANVSYKYMQGSIEAFCEGDLYGKYQAKFNKEIPDIDENAKPQKLPPFKNEDDCEFFKNPVVFRSINETRKLINAIIDKYGYPAAVNIETADELNKTFEDRAIDTKRNNDNQKENDRIVKEIIECIKCDEVHARHLIEKYKLWEAQEGKCLYSGETITKEDMLRDKDKLFEVDHIVPYSLILDNTINNKALVYAEENQKKGQRTPLMYMNEAQAADYRVRVNTMFKSKKCSKKKYQYLMLPDLNDQELLGGWRSRNLNDTRYICKYLVNYLRKNLRFDRSYESSDEDDLKIRDHYRVFPVKSRFTSMFRRWWLNEKTWGRYDKAELKKLTYLDHAADAIIIANCRPEYVVLAGEKLKLNKMYHQAGKRITPEYEQSKKACIDNLYKLFRMDRRTAEKLLSGHGRLTPIIPNLSEEVDKRLWDKNIYEQFWKDDKDKKSCEELYRENVASLYKGDPKFASSLSMPVISLKPDHKYRGTITGEEAIRVKEIDGKLIKLKRKSISEITAESINSIYTDDKILIDSLKTIFEQADYKDVGDYLKKTNQHFFTTSSGKRVNKVTVIEKVPSRWLRKEIDDNNFSLLNDSSYYCIELYKDSKGDNNLQGIAMSDIVHDRKTKKLYLKPDFNYPDDYYTHVMYIFPGDYLRIKSTSKKSGEQLKFEGYFISVKNVNENSFRFISDNKPCAKDKRVSITKKDIVIKLAVDLMGKVQGENNGKGISCGEPLSLLKEKN

SEQ ID NO: 207 - protein, 1440 aa, Weeksella virosa
MKTILGLDLGTNSIGWALVEQDFENKQGLILGMGSRIIPMDAGIIGKFAEGSSISQTAERTGYRSIRRLRERHLLRRERLHRVLNILKFLPEHYAAEIDFEKRFGQFLAETEPKLAWKKNAEGKFEFLFQRSFDEMVADFKANGQDIKIPYDWTIYYLRKKALTQKISPQELAWIILNFNQKRGYYQLRGEEEEENPNKKVEFYSLKIVDVVADEQPNKKGDTWYSLHLENGWVYRRSSKIPLYDWKDKVRDFIVTTDINEDGSEKLDKDGEVKRSFRAPKEDDWTLIKKKTEQEIEQFNQTVGSYIYEALLDNPTQKIRGKLVRTIERKFYKSELKKILEKQIELQPELFTEDLYNACARELYRRNVAHQQQLSSRDFVYLFLNDIIFYQRPLRSQKSLISNCSLEFRTIKDKDGNGQIIYLKAIPKSNPYYQEFRVWQWLYNLKIFTKEDDKDVTNQFINKVEDLEALFEFLMNQKEVNHTDILTYLIEPIVKSKYPNAKGKAFKDELKKELKKYRWNYVYDADKDESKSYPMNETRYELRKRLDKVENVPADFMTRKIEQHLWHIIYSVTDKIEFEKALKSFANKYDLHQESFVENFKRFKPFDSDYGTYSEKAIKKLLPLMRVGKYWSWDIIDDKTKTRIGKIITGEYDETIKNRVREKAIDLTEENHFQGLQLWLAQYIVYDRHSEADIAGKWNSVADLEQYLSEFKQHSLRNPIVEQVITETLRVVRDIWKQYGKGAKDYFDEIHIELGREMKNTAEERKRLSSIISENETTNLRIRAILEELMYDENMENVRPYSPMQQEALKIYEDGVLSSSVEIPEDIEKISKKSEPTKSEIQRYKLWLEQKYRSPYTGRPIPLSKLFTPAYQIEHIIPQARFFDDGFSNKVICESEVNALKDKMLGLEFIQNYYGQKVTTSFGEVTILTEDAYKAFVKEHYDKNRSKRNKLLLEEIPEKMIDRQMNDTRYISKYISKVLSNLVRGEKDDEGVNSKNIIPGNGKITGILKQDWGLNDVWNDLILPRFERMNQLTNSTDFTAWNEKHQKFLPSVPLELSKGFQKKRIDHRHHALDALIIACATRDHVNLLNNKHAKSRNERYDLQHKLRHTTPWQDKEGKVRTKFTEFKKPWETFTQDTKKELEKIVVNFKQNLRVINKATNYYEKIVDGKKVMFKQEGVNWAIRKPMHKETVSGKIDLPRVKVSKGKILTATRKSLDTSFNAKTILSITDTGIQKILLNYLKAKGNPELAFSPEGIEEMNQNISLYNDGKPHQPILKVRVFEQGSKFPLGETGNKTTKYVEAAKGTNLFFGVYEDNQGKRSYDTIPLNIVIERQKQGLNSVPETNEKGHRLLFSLSPNDLVYVPIEGEVFDETNPDVNRIYKVVSFSGSQMFCVRQDVATSIVYKLEFSSLNKMERTIDGIMIKEICIKLKVDRLGNISKA

SEQ ID NO: 208 - protein, 1179 aa, Sphaerochaeta globus
MSKKVSRRYEEQAQEICQRLGSRPYSIGLDLGVGSIGVAVAAYDPIKKQPSDLVFVSSRIFIPSTGAAERRQKRGQRNSLRHRANRLKFLWKLLAERNLMLSYSEQDVPDPARLRFEDAVVRANPYELRLKGLNEQLTLSELGYALYHIANHRGSSSVRTFLDEEKSSDDKKLEEQQAMTEQLAKEKGISTFIEVLTAFNTNGLIGYRNSESVKSKGVPVPTRDIISNEIDVLLQTQKQFYQEILSDEYCDRIVSAILFENEKIVPEAGCCPYFPDEKKLPRCHFLNEERRLWEAINNARIKMPMQEGAAKRYQSASFSDEQRHILFHIARSGTDITPKLVQKEFPALKTSIIVLQGKEKAIQKIAGFRFRRLEEKSFWKRLSEEQKDDFFSAWTNTPDDKRLSKYLMKHLLLTENEVVDALKTVSLIGDYGPIGKTATQLLMKHLEDGLTYTEALERGMETGEFQELSVWEQQSLLPYYGQILTGSTQALMGKYWHSAFKEKRDSEGFFKPNTNSDEEKYGRIANPVVHQTLNELRKLMNELITILGAKPQEITVELARELKVGAEKREDIIKQQTKQEKEAVLAYSKYCEPNNLDKRYIERFRLLEDQAFVCPYCLEHISVADIAAGRADVDHIFPRDDTADNSYGNKVVAHRQCNDIKGKRTPYAAFSNTSAWGPIMHYLDETPGMWRKRRKFETNEEEYAKYLQSKGFVSRFESDNSYIAKAAKEYLRCLFNPNNVTAVGSLKGMETSILRKAWNLQGIDDLLGSRHWSKDADTSPTMRKNRDDNRHHGLDAIVALYCSRSLVQMINTMSEQGKRAVEIEAMIPIPGYASEPNLSFEAQRELFRKKILEFMDLHAFVSMKTDNDANGALLKDTVYSILGADTQGEDLVFVVKKKIKDIGVKIGDYEEVASAIRGRITDKQPKWYPMEMKDKIEQLQSKNEAALQKYKESLVQAAAVLEESNRKLIESGKKPIQLSEKTISKKALELVGGYYYLISNNKRTKTFVVKEPSNEVKGFAFDTGSNLCLDFYHDAQGKLCGEIIRKIQAMNPSYKPAYMKQGYSLYVRLYQGDVCELRASDLTEAESNLAKTTHVRLPNAKPGRTFVIIITFTEMGSGYQIYFSNLAKSKKGQDTSFTLTTIKNYDVRKVQLSSAGLVRYVSPLLVDKIEKDEVALCGE

SEQ ID NO: 209 - protein, 1370 aa, Streptococcus gallolyticus
MTKKNYSIGLDIGTNSVGWAVITDDYKVPAKKMKVLGNTDKKYIKKNLLGALLFDSGETAEATRLKRTARRRYTRRKNRLRYLQEIFAEEMTKVDESFFYRLDESFLTTDEKDFERHPIFGNKAEEDAYHQKFPTIYHLRNYLADSSEKADLRLVYLALAHMIKYRGHFLIEGKLNAENTDVQKLFTDFVGVYDRTFDDSHLSEITVDVASTLTEKISKSRRLENLIKYYPTEKKNTLFGNLIALALGLQPNFKMNFKLSEDAKLQFSKDTYEEDLEELLGKIGDDYADLFTSAKNLYDAILLSGILTVDDNSTKAPLSASMIKRYVEHHEDLEKLKEFIKANKSELYHDIFKDKNKNGYAGYIENGVKQDEFYKYLKNTLSKIDGSDYFLDKIEREDFLRKQRTFDNGSIPHQIHLQEMHAILRRQGDYYPFLKEKQDRIEKILTFRIPYYVGPLVRKDSRFAWAEYRSDEKITPWNFDKVIDKEKSAEKFITRMTLNDLYLPEEKVLPKHSHVYETYAVYNELTKIKYVNEQGKESFFDSNMKQEIFDHVFKENRKVTKEKLLNYLNKEFPEYRIKDLIGLDKENKSFNASLGTYHDLKKILDKAFLDDKVNEEVIEDIIKTLTLFEDKDMIHERLQKYSDIFTANQLKKLERRHYTGWGRLSYKLINGIRNKENNKTILDYLIDDGSANRNFMQLINDDTLPFKQIIQKSQVVGDVDDIEAVVHDLPGSPAIKKGILQSVKIVDELVKVMGDNPDNIVIEMARENQTTNRGRSQSQQRLKKLQSSLKELGSNILNEEKPSYIEDKVENSHLQNDQLFLYYIQNGKDMYTGDELDIDHLSDYDIDHIIPQAFIKDDSIDNRVLTSSAKNRGKSDDVPSLDIVRARKAEWVRLYKSGLISKRKFDNLTKAERGGLTEADKAGFIKRQLVETRQITKHVAQILDARFNTEHDENDKVIRDVKVITLKSNLVSQFRKDFEFYKVREINDYHHAHDAYLNAVVGTALLKKYPKLASEFVYGEYKKYDIRKFITNSSDKATAKYFFYSNLMNFFKTKVKYADGTVFERPIIETNADGEIAWNKQIDFEKVRKVLSYPQVNIVKKVETQTGGFSKESILPKGDSDKLIPRKTKKVYWDTKKYGGFDSPTVAYSVFVVADVEKGKAKKLKTVKELVGISIMERSFFEENPVEFLENKGYHNIREDKLIKLPKYSLFEFEGGRRRLLASASELQKGNEMVLPGYLVELLYHAHRADNFNSTEYLNYVSEHKKEFEKVLSCVEDFANLYVDVEKNLSKIRAVADSMDNFSIEEISNSFINLLTLTALGAPADFNFLGEKIPRKRYTSTKECLTATLIHQSITGLYETRIDLSKLGEE

SEQ ID NO: 210 - protein, 1044 aa, Nitrosomonas sp.
MLHKMRYRLALDLGSTSLGWAMVRLNANQQPCAVIKAGVRIFSNGRNPKDGSSLAVTRREARSMRRRRDRLLKRKARMMRTLIEYGFFPANETQRKALENLNPYALRAKGLDEALTPSEFARALFHINQRRGFKSNRKTDKKDSDSGALKTAIKQLHSVLDPQGNDGKPRTVGELLYKRFTDLSKLPKDRTVRARYRQDKIVKDDGKTKIDKYYDLYIDRAMIEQEFDALWKKQSELNPILFTENARADLKDVLLYQRSLKPVKPGRCTFMSEEERAPLALPSTQRFRMYQEVNNLRILREGLKEESLTLQQRDDLINALEKNNRRTFTQIKKLLGVGGSVQFNFEDPKREELKGNTTSAILGKSEHFGEAWFAFNEAKQDAIVLQLIKEENEAKLVRWLQDETGIDEKRAEVIANAGLPEGYGSLCIEALARILPELRRDVVTYDKAVQAAGFEHHSKLNRNEEIPDITFKIESIDRNSGEIKQFHLHKELPYYGEYLQRHVGFGSGKPEDSIEKRYGKIANPTVHIGLNQVRVVVNALIKRYGHPSEIIVEVARDLKQSKDRRDEENKRQAENQKRNERLRKDIADILGISEERVRRDDIEKMILWEELSFDPADRRCPYSGVQVSTVMLLSDEVEVEHILPFSQTLDDSLNNKTVALRQANRIKGNRTPWEAFGTSNISGFDYSGILTRAELMPKAKRYRFAEDGYQRWLKDDAGFLARALNDTRHLSKIAREYMSLICPNTRVIPGQMTAMLRRNFGLNDVLGLNGEKNRNDHRHHAVDACVIAVTDQGLLQRFAAASASARERQLNRLVENMPLPWESYREHVRRAIDGIWVSHRPDHSHEGAMHNDTAYGLRGNGRVSFHKMVEGKREYIEDNLKVIEITDTKAIDRHGLLPTGKPRPYKGYKGDSNYCIEIVRNEKGRWEGEIISTFDAYQLVRKYGIVQLRYPVLSVSGKPLVMRLIRNDFVRLEHEGITRTLRVCKMREDGQVALADVTEANVDARTRTKEICYVFKTGGSLQKAKARRITISPIGELRDPGFKE

SEQ ID NO: 211 - protein, 1045 aa, Acidovorax avenae
MQKEKPLAYRLALDLGSTSLGWAVLRLSAPGEPSAVIRAGSRIFSDGRNPKDGSSLAVTRRAARAMRRRRDRLLKRKARMLAALERHGFFPQDEAARKALEKLNPYGLRARGLESALKPEEFGRALFHLNQRRGFQSNRKTDRKDSDSGALKQAIGTLRAQMHESGCRTVGEWFWKVRMERKPEGVKGQGVRARYRETPFTTDEGKKRIDKRYDLYVDRAMVAQEFDALWAAQATFAPALFNEAARAELRDILLHQRKLRPVQPGRCTLVPEEPRALLALPSTQRFRIYQEVNHLRVLHDELREEALTLAQRDQIVALLERQAKVTFTAMRKALGFSALFNLEDAKRDGLKGNATTAALGKKDLFGPLWAGFDTALQDEIVTQLMTEESEPRLIAWLQEHTGVDEARAQAIANAGLPEGYGSLGRTALARIVPELQRDVITYDKAVQAAGFAHHSDLGFSFEHDADEVERIGERTIASTGEIKPVFAFKQLPYYGRALQRHVAFAKENPRNDEERYGKIANPTVHIGLNQVRVVVNALMCRYGRPTEVVIELARDLKQSREQKLEAQQRQADNQKRNARIRRSIAEVLGISEERVRTLDIQKWILWEELSHDAADRRCPYSGVQISASMLLGERVEIEHILPFSMTLDDSLNNRTVALREANRIKRNRTPWDARTDFEAHGWSYDGILQRAERMPQRKRHRFAPDGYERWLGEDKDFLARALNDTRYLSRVAAEYLRLVCPGSATRVIPGQMTALLRGKFGLNDVLGLDGEKNRNDHRHHAVDACVIGVTDQRMMQRFAQANAQAREDGLTRLVEDMPLPWPTYRAHVERAVRHIWVSHKPDHGFEGAMMEETSYGILRDGTIKQRRKADGSAGREISRLIRITEPSQPQRHGVDAEGRPLPYKGYVGGSNYCLEITVNDKGKWEGQVISTFDAYRIVREGGLRQLRHSTQGQNGQALAMRLVIGDSVRLEVDEQERVMRIVKINGNNGQVFMAPVHEANVDARNSDKNEAFAYTSKIAGSFQKTKARQVTISPIGELRDPGFKG

SEQ ID NO: 212 - protein, 1218 aa, Prevotella denticola
MKASEEKLSKGLSTYMKENNLLTVGAAFAQLEDEGVRIRNNNNYRAIRSQFQHEIETIFMFQQGLSENELYERLVSEKKNIGTIFYKRPLRSQRGNVGKCTLERTKPRCAIGHPLFEKFRAWTLINNIKIRMSEEEQAEQLPMKLRFELYNDCFLAFVRAEFKFEDIRKYLEKRLGVHFSYNDKTINYKDSTSVAGCPITARFRKLLGEDWESFHVDGQKQRQAHGKNNASFHTVSYSTNDIWHFCYDAEEPEAVLSFAQDNLKWEKKKAEELVRIWSAIPQGYAMLSQKAIRNINKMLILGLKYSDAVLLAKVPEIVEITDGEILSVTEDYHRVEAQVGYEKQINNIVNALIAKYKSASEEYRFADHNYEYQLDKSDEKDIIKQIESNIGTRKWSLLDADEQTDILQKVRDKYQNFFRSHERKFVESPKLGECFEEYLMKKFPMVEGEQWKKLYHPSQIAIYRPVSAGKDRSALRLGNPDIGAIKNPTVLRVLNTLRKRVNQLLDDGLISPDETRVVVETARELNDANRKWALDNYNRIRHDENEKIKKILEEFYPKRDGISTDDIDKARYVIDQREMDYFTEEKPYNKDIKKYKLWLEQGGQCMYTGRTINLSNLFDPNSFDVEHTIPESISFDSSDMNLTLCDAHYNRFIKKNHIPADLPNYDKSVVIDGKEYSPIKPRLQRWADRVERLNRNVEYWRGQARRAQNKDRKDQCMREMHLWKMELEYWTKKLERFTITEVTDEFKNSQLVDTRVITRHAVLYLKSIFPHVDVQRGDVTAKFRKILGIQSVDEKKDRSLHSHHAIDATTLTIIPGAAKRERMLELFAKIEEVNKMLSFSGNEDRTGLKQELDGLKNQLNKEVKACRIGHNVSEIGTFINDNIIINHHVKNQALTPVRRRLRKRGHIVGGMDNPRWQTGDALRGEIHKASYYGAITQFAKDKDGKVLLKEGHPLVDPTIKFVIRRELKYKKSTADSGFASWDDLEKAIVDKELFALMKGQFPEETSFKDACEQGIYMIKKGKNGEVDTKLYRIRHIRCKTKQKNALKIKEQAYKSEKEYKRYFYAAVGDLYAMCCYTNGKTREFKIYSLYDISCHRKVGVEDIPEFITDKKGNRLMLDYKLHTGDMILLYKENPEELYDLDNVSLSKLLYKINGFENDGLRIRMVNHLVAKEAMGESVKDYAKLPDIIRCGVKTIKFLVMGENRDFVIKNGKISFNHR

SEQ ID NO: 213 - protein, 1458 aa, Fluviicola taffensis
MTKTILGLDLGTNSIGWALINQDFDNKKGEILGMGSRIIPMTQDIKDEFGKGNSISQTAERTRLRGVRRLIHRTLLRRERLHRVLNIIGFLPEHYANQIDFEKRFGKFKPESEPKISFDGNDVFLFEKSYQEMLVDFKIHQPQLVSNGKKIPHDWTIYYLRKKALSKKIEKEELAWILLNFNQKRGYYQLRGEEEEETPNKLVEFHSLKIVEVNADEPQKGKPEIWYSLVLENGWVYRRASKTPLFDWKDKIREFIVTTEINNDGTVKTDKEGTEKRSFRAPKPEDWTLQKKKTEFELSKSGNEVGAFIYESILQKPNQKIRGKLISTIERKFYKEELKTILKTQLFFHKELKDEKLYNACIEELYKNNEAHRSLLSNKGFEHLFINDILFYQRPLRSKKSQISNCPLEKRTYKKEGIEITEGIKVISKSNPIYQEFRLWQWISNLSLYCIEPTETNVTSTFLNSIEDYENLFEFLNNRKEIEQKHLLKYLLENQGFKGKLLTNELEKFRWNFVADKKYPCNETGSLLHTRLSKVKNISPDFLTKEIEHQLWHIIYSVTDKIEYEQALKTFARKNNLDVDSFFEHFKKIPPFESTYGAYSEKAIKKLLPLIRLGKYWNWEAIDSISKDRISKILSGEYDENIKNRVREKAVHLTSENNFQGLQEWLAKYIVYDRHSEGNDLGKWTSVSDLETYLKEFKQHSLRNPIVEQVITETLRVVKDIWIKHGKGTENFFDEIHVELGREMKNNSEDRKRLTNTITENENTNLRIKALLMEMMNDNDVENVRPYSPSQQEILKIYEDGALNSNIELDDEIVKISKKAEPTKSELQRYKLWLEQKYRSPYTGQVIPLNKLFTSEYEIEHVVPQSRFFDDSFSNKVICESAVNKRKDNQLGLQFIKNHSGEKVELGFGKVVQVFTEEQYLDFVKEHYSKNRSKHNKLLLEEIPEKMIERQLNDTRYISKFVSSILSNIVRSEKDDDGLNSKNILPGNGKITTELKRDWGLNDVWNDLILPRFERMNTITNSDLFTTYNDKYQKHLPTVPFEYSKGFQKKRIDHRHHAMDALVIACATRDHLNLMNNQSAKSELKRYDLQNKLRKKEPYFNQKENKQKEAFKDFIKPWGTFTEDSKNALEKIIISFKQNLRVINKATNSYESYKDEDGNLRIGKDGKPEKGLIKQKGLNWAIRKPLHKDTVSGQINLSRIKLPNGKILTATRKNLDTSFDLKTIENSITDTGIQKILKNYLLSKESPELAFSPEGLEEMNNEIEKYNNGKFHHPINKARIYELGSKFNVGQTGNRRDKFVEAAKGTNLFFAIYQDENKNRSYETIPLNEVIEHQKWRASLPKEEQEKIPLVPVNKLKGTFIFSLSPNDLVYVPSNDELERSASIDFSKLKKEQINRLYKMVSSSGSQCFFVKSEVATSVVNKMEYSSLNKMEKSIDNLMVKEICIKLKIDRLGNISKA

SEQ ID NO: 214 - protein, 1384 aa, Coriobacterium glomerans
MKLRGIEDDYSIGLDMGTSSVGWAVTDERGTLAHFKRKPTWGSRLFREAQTAAVARMPRGQRRRYVRRRWRLDLLQKLFEQQMEQADPDFFIRLRQSRLLRDDRAEEHADYRWPLFNDCKFTERDYYQRFPTIYHVRSWLMETDEQADIRLIYLALHNIVKHRGNFLREGQSLSAKSARPDEALNHLRETLRVWSSERGFECSIADNGSILAMLTHPDLSPSDRRKKIAPLFDVKSDDAAADKKLGIALAGAVIGLKTEFKNIFGDFPCEDSSIYLSNDEAVDAVRSACPDDCAELFDRLCEVYSAYVLQGLLSYAPGQTISANMVEKYRRYGEDLALLKKLVKIYAPDQYRMFFSGATYPGTGIYDAAQARGYTKYNLGPKKSEYKPSESMQYDDFRKAVEKLFAKTDARADERYRMMMDRFDKQQFLRRLKTSDNGSIYHQLHLEELKAIVENQGRFYPFLKRDADKLVSLVSFRIPYYVGPLSTRNARTDQHGENRFAWSERKPGMQDEPIFPWNWESIIDRSKSAEKFILRMTGMCTYLQQEPVLPKSSLLYEEFCVLNELNGAHWSIDGDDEHRFDAADREGIIEELFRRKRTVSYGDVAGWMERERNQIGAHVCGGQGEKGFESKLGSYIFFCKDVFKVERLEQSDYPMIERIILWNTLFEDRKILSQRLKEEYGSRLSAEQIKTICKKRFTGWGRLSEKFLTGITVQVDEDSVSIMDVLREGCPVSGKRGRAMVMMEILRDEELGFQKKVDDFNRAFFAENAQALGVNELPGSPAVRRSLNQSIRIVDEIASIAGKAPANIFIEVTRDEDPKKKGRRTKRRYNDLKDALEAFKKEDPELWRELCETAPNDMDERLSLYFMQRGKCLYSGRAIDIHQLSNAGIYEVDHIIPRTYVKDDSLENKALVYREENQRKTDMLLIDPEIRRRMSGYWRMLHEAKLIGDKKFRNLLRSRIDDKALKGFIARQLVETGQMVKLVRSLLEARYPETNIISVKASISHDLRTAAELVKCREANDFHHAHDAFLACRVGLFIQKRHPCVYENPIGLSQVVRNYVRQQADIFKRCRTIPGSSGFIVNSFMTSGFDKETGEIFKDDWDAEAEVEGIRRSLNFRQCFISRMPFEDHGVFWDATIYSPRAKKTAALPLKQGLNPSRYGSFSREQFAYFFIYKARNPRKEQTLFEFAQVPVRLSAQIRQDENALERYARELAKDQGLEFIRIERSKILKNQLIEIDGDRLCITGKEEVRNACELAFAQDEMRVIRMLVSEKPVSRECVISLFNRILLHGDQASRRLSKQLKLALLSEAFSEASDNVQRNVVLGLIAIFNGSTNMVNLSDIGGSKFAGNVRIKYKKELASPKVNVHLIDQSVTGMFERRTKIGL

SEQ ID NO: 215 - protein, 1077 aa, Neisseria bacilliformis
MQQKPQRYILGLDLGIASVGWACVWADENEHPTGLLDCGVRTFERAEVPKTGDSLALARRQARSVRRLIRRRAHRLLRLRRLLKREGVLLSADFNENGLVRGLPIDAWALRVAGLDRKLSNKEWAAVLLHLVKHRGYLSQRKNETQSKDKELGRLLAGVNGNREALQNRSDEYRTAAELAVKKFAAENNGSLRNKGGDYSHTFDRKDLQRELHLLFERQRALDNPFTSSEMEAAVDELLMKQRSALQGEAVLKMLGRCTFEPSEYKAAKNTYSAERFVWLTKLNNLRIQYNGEERALSEAERRLLLDEPYQKAKLTYKQVRTILELPESAVFKGLRYGHGEDGLKAESGTLMEMKAYHAVRKALKDAGLEGEWENRIRNPELLDAIGTAFSLYKTDEDIRANLAAFRLSENVLEALLAGLNFDKFVHLSLKALAKILPLMEQGMRYDEACKEAYGDHYGAKEQEDHRLLPPFVADDIRNPVVFRTLTQARKIVNEIVRRYGSPLRVHIETGREVGKSFSDRKEIEKRQEENRKERERAAAHFKELFPNFAGEPKAQDILKLRLYEQQHGKCLYSGKEIDLRRLPEKGYVEIDHALPFSRTWDDSFNNKVLVLGKENQDKRNRTPYEYLDGKGNSGAWRAFAERVSGCRFPYAKKQRLLTQKLDEKTEQGFLERNLNDTRYVARFLCQFIEEKMHLEGAGKKRVFASNGQITALLRGFWGLKKVREENDRHHALDAVVVACSSVSMQQKITRHFRYREELEHIDRETGEVIHGFPQPWEFFRQEVMTRVFSDDPVSELAEKLDSRPEAVHEFVTPLFVSRAPHRKVTGQGHLETIRSAKRLDEKISVVKLPLTQLKTKDIERIVGYPNREPALYDALAARLAAFKDDPAKAFSEPFYKTGKDGKCGVLVKAVRVENVQKSGLLVRKDESGKMQGVADNATMVRVDVFGKNGKNYLVPVYAWQVEKGELPNRAVVAYADEEDWDEMDDSFEFKFSLYPNDLVEVVTKKDKFFGYYSGFNRATGAINIKEHDLSKSKVKNGVYEGIGVKTAQSFQKYQVDTLGKTIRLCKPEKRMGFKKK

SEQ ID NO: 216 - protein, 1029 aa, Alicycliphilus denitrificans; identical to SEQ ID NO: 193

SEQ ID NO: 217 - protein, 1122 aa, Streptococcus suis; identical to SEQ ID NO: 87

SEQ ID NO: 218 - protein, 1428 aa, Parasutterella excrementihominis
MGKTHIIGVGLDLGGTYTGTFITSHPSDEAEHRDHSSAFTVVNSEKLSFSSKSRTAVRHRVRSYKGFDLRRRLLLLVAEYQLLQKKQTLAPEERENLRIALSGYLKRRGYARTEAETDTSVLESLDPSVFSSAPSFTNFFNDSEPLNIQWEAIANSPETTKALNKELSGQKEADFKKYIKTSFPEYSAKEILANYVEGRRAILDASKYIANLQSLGHKHRSKYLSDILQDMKRDSRITRLSEAFGSTDNLWRIIGNISNLQERAVRWYFNDAKFEQGQEQLDAVKLKNVLVRALKYLRSDDKEWSASQKQIIQSLEQSGDVLDVLAGLDPDRTIPPYEDQNNRRPPEDQTLYLNPKALSSEYGEKWKSWANKFAGAYPLLTEDLTEILKNTDRKSRIKIRSDVLPDSDYRLAYILQRAFDRSIALDECSIRRTAEDFENGVVIKNEKLEDVLSGHQLEEFLEFANRYYQETAKAKNGLWFPENALLERADLHPPMKNKILNVIVGQALGVSPAEGTDFIEEIWNSKVKGRSTVRSICNAIENERKTYGPYFSEDYKFVKTALKEGKTEKELSKKFAAVIKVLKMVSEVVPFIGKELRLSDEAQSKFDNLYSLAQLYNLIETERNGFSKVSLAAHLENAWRMTMTDGSAQCCRLPADCVRPFDGFIRKAIDRNSWEVAKRIAEEVKKSVDFTNGTVKIPVAIEANSFNFTASLTDLKYIQLKEQKLKKKLEDIQRNEENQEKRWLSKEERIRADSHGICAYTGRPLDDVGEIDHIIPRSLTLKKSESIYNSEVNLIFVSAQGNQEKKNNIYLLSNLAKNYLAAVFGTSDLSQITNEIESTVLQLKAAGRLGYFDLLSEKERACARHALFLNSDSEARRAVIDVLGSRRKASVNGTQAWFVRSIFSKVRQALAAWTQETGNELIFDAISVPAADSSEMRKRFAEYRPEFRKPKVQPVASHSIDAMCIYLAACSDPFKTKRMGSQLAIYEPINFDNLFTGSCQVIQNTPRNFSDKTNIANSPIFKETIYAERFLDIIVSRGEIFIGYPSNMPFEEKPNRISIGGKDPFSILSVLGAYLDKAPSSEKEKLTIYRVVKNKAFELFSKVAGSKFTAEEDKAAKILEALHFVTVKQDVAATVSDLIKSKKELSKDSIENLAKQKGCLKKVEYSSKEFKFKGSLIIPAAVEWGKVLWNVFKENTAEELKDENALRKALEAAWPSSFGTRNLHSKAKRVFSLPVVATQSGAVRIRRKTAFGDFVYQSQDTNNLYSSFPVKNGKLDWSSPIIHPALQNRNLTAYGYRFVDHDRSISMSEFREVYNKDDLMRIELAQGTSSRRYLRVEMPGEKFLAWFGENSISLGSSFKFSVSEVFDNKIYTENAEFTKFLPKPREDNKHNGTIFFELVGPRVIFNYIVGGAASSLKEIFSEAGKERS

SEQ ID NO: 219 - protein, 1371 aa, Lactobacillus buchneri
MKVNNYHIGLDIGTSSIGWVAIGEDGKPLRIKGKTAIGARLFQEGNPAADRRMFRTTRRRLSRRKWRLKLLEEIFDPYITPVDSTFFARLKQSNLSPKDSRKEFKGSMLFPDLTDMQYHKDYPTIYHLRHALMTQDEKFDIRMVYLAIHHIVKYRGNFLNSTPVDSFKASKVNFVDQFKKLNELYTAINPEESFQINLANSEDIGHQFLDPSIRKFDKKKQIPKIVPVSVDDKATDKINGKIASEIINAILGYKSKLDVVVQCTPVDSKSWALKFDEEDIDAKLQKILPEMDENQQSIIAILQNLYSQVTLNQIVPNGMSLSESMIEKYNDHHDHLKLYKKIIDQLADPKKKAALKKAYSQYVGDDGKVIEQADFWSSVKKNLDDSDLSKQIMDLIDAEKFMPKQRTSQNGVIPHQLHQRELDEIIEHQSKYYPWLAEINPNKHDLHLAKYKIEELVAFRVPYYVGPMITPDDQAKSAETVFSWMERKGKEAGQITPWNFDEKVDRNASANRFIKRMTTKDTYLIGEDVLPDESLLYEKFKVLNELNMVRVNGKLLKVADKQAIFQDLFENYKHISVKKLQNYIKSKTGLPSDPEISGLSDPEYFNNSLGTYNDFKKLFGNKVDEPDLQDDFEKIVEWSTVFEDKRILREKLNEITWLSDQQKDVLESSRYQGWGRLSKKLLTGIVNDQGERIIDELWNTNKNFMQIQSDNDFAKRIHEANADQMKAVDVEDVLADAYTSPQNKKAIRQVVKVVDDIQKAMGGVAPKYISIEFTRSEDRNPRRTISRQRQLENTLKDTAKSLAKSINPELLSELDNAAKSKKGLTDRLYLYFTQLGKDIYTGKPINIDEISTYDIDHILPQAFVKDDSLNNRVLVSKAINNGKSDNVPVQLFGAKMGHFWKQLAEAGLISKRKLKNLQTDPDTISKYAMHGFIRRQLVETSQVIKLVANILGDKYRNDNTKIIEITARMNHQMRDEFGFIKNREINDYHHAFDAYLTAFLGRYLYHRYIKLRPYFVYGDFKKFKEDKVTMRNFNFLHDLTDDTQEKIADAETGEVIWDRENSIQQLKDVYHYKFMLISHEVYTLRGAMFNQTVYPASDAGKRKLIPIKADRPINVYGGYSGSADAYMAIVRIHNKKGDKYRVVGVPMRARDRLDAAKKVSDADCDRALKDVLTPQLTKTKKSRKTGEITQVVEDFEIVLGKVMYRQLMIDGDKKFMLGSSTYQYNAKQLVLSDQSVKTLASKGRLDPLQESMDYNNVYTEILDKVNQYFSLYDMNKFRHKLNLGFSKFISFPNHNVFDGNTKASSGKREILEEVLNGLHANPTFGNLKDIGITTPFGQLQQPNGILLSDEAKIRYQSPTGLFERTVSLKDL

SEQ ID NO: 220 - protein, 1090 aa, Sphingomonas sp.
MDWRLGLDLGANSLGWAALRLDRAGDPIGILAMGSRIFSDGRDPKSGASLAVDRRAARAMRRRRDRFKQRQAALLKYLIRDGLFPADQADRQRLADEDPYALRARALDEELSLFEIGRALFHLNQRRGFQSNRKADRGQDDEAGKIAVGVDRLNQQMEEQGARTLGEFLHQRRRAATDANHIPSVRTRLRPETGEGAKGDGYDFYPSRALIAEEFEEIWAAQAPHYPDTLTQQVHDRLYEIIFHQRPLRAPQVGQCTLVAGETRLPKAHPLFQKRRLLEEINALMIVRPGEIAQRLTPEERDTLYLKLKDKRTVSFATLRKTLKLDSAARFNKESENRTELKGDEVAAELGAKTRLGTRWQHLSGDQQWEVVHRLMALESQADEAAFRDWISQTYDLLPEQAAAVLGARLPQGHGRFGPTATTTLIDSLLHDRTEDGRVVVYSEAVQRSGLGHHSDLRHDRDDEDVTELPYYGVALERHIMPGTAEPTDPEEMRIGRLTNPTVHIGLNQLRHVVNRLIRAYGPPKEIAIELARELKLSEDEKKKRNSENRDNRLAAEGRSKKLEEIRQRDTGANRALLKLWEELNPGNVLDRRCIYTGEQISIDMLFSDRVEVDHILPFAQTLDDSNGNKLLCLREANREKRRRSPYEAWGHTDRWPDIAERASRLPKPKRWRFEPDAMQRFATEDGFLARHLVDTQYLGRLAREYLSWLYPGRGEGSGHVWVSPGRLTEMVRRKLGLNDLLPDHNFGGGADQPKNRLDHRHHAIDALVVAIVDRGMLQAIARASGQDGSEGRERIHIPAPWDGFRDDLRVAVNGIIVSHRPDHGTVAKAGLARGRDQTAGRLHNDTAYGLTGETDAKGNSIVVRRIPLSAIKKPADIARVRDPLLRNALAEFTKGLDGKAFEARIGRFHELGPLLYRGIRRVRVVETLTVIPIRDAEGRAYKGYKGDSNYRYDVWEMPDGKWRCQVVSMFDAHQSTEQARPHPAARKILSLQRNDILAIERTEGDRELVRVVKFSEKQFAVAPPHEGGSLKTRDGNADDPFRYLYPSPNTLKGWRARQVRIDELGRVLDPGFPARKSVRRTRPRAAPVD

SEQ ID NO: 221 - protein, 1000 aa, Kingella kingae
MARAQRRLISRRANRMNKLRRLLKQENVLQANDYDEKGLIIGLPNQAWELRAQGLDRKLEPKEWAAVLINLVKHRGYLSQRKNESQTADKELGALLSGMNHNHQLLQSQSNQYRTPAELAIKQFATQDGHIRNQRGAYTHTFNRLDLQNELNQLFDAQTRLGNPHVSGSLKTAINDLLMNQKAALSGDAILEMLGRCTFEPSEYKAAKNTYSAERFVWLGKLTNLRIQDNGLESALSREQRELLLNEPYNKTKLTYQQVRKLLRLPETAFFKGLRYGKDNAESATFMEMKSYHAIRKSLENKSLKSEWEKLKTQPKLLDLIGTAFSIYKTDDEIAGCLKNQLPENVIIALQEQLNFSNFMELSLKALEKLLPLMEQGLRYDEACTQIYGNRHEKIADKTEKFLPNIPADKLRNPVVLRTLTQARKVINAIIRRYGSPARVHIETGREVGKSFSDRDKLKKQQEENQEQRRRAIDEWKQFFPNAAHEPKAVDILKLRLYQLQQGKCLYSGLPIDVRRLPEKGYVEIDHALPFSRTWDDSFNNKILVLASENQNKGNQTPYEYLRGADNSESWRLFVENVQNCQFSPNKKQKIMAKQLDEKGFLERNLNDTRYVSRFLCQFISEHLHLTGKGKKRVFASNGQITALLRGRWGLSKNREENDRHHAVDAVVVACSTVAMQQKITQFVRYQKGNVFTGERIDKETGEVISIHFPTPWEHFREEVMIRVFDDNPLRTLPEKLPNRPEALHEYVMPLFVSRMPTRKMTGQGHKETIKSAKRLDEKISVLRVPLTQLKLNDLENMVNREREPALYEALKARLEQFKNDPAKAFAEPFFKQGGQQVKAVRVEIVQKSGMLLRKINGVADNGSMVRVDVFEKSGKFYLVPIYAWQVAEGILPNYAVVAHKDESDWILMDESYHFKFALYKNDLLEVQTKKGGIMGYFASLDRATGAITIREHDRDKKKCKDGEHRSIGVKMASSFKKLQVDELGKNIHETRSRKRPNIG

SEQ ID NO: 222 - protein, 1130 aa, Streptococcus pasteurianus
MTNGKILGLDIGIASVGVGIIEAKTGKVVHANSRLFSAANAENNAERRGFRGSRRLNRRKKHRVKRVRDLFEKYGIVTDFRNLNLNPYELRVKGLTEQLKNEELFAALRTISKRRGISYLDDAEDDSTGSTDYAKSIDENRRLLKNKTPGQIQLERLEKYGQLRGNFTVYDENGEAHRLINVFSTSDYEKEARKILETQADYNKKITAEFIDDYVEILTQKRKYYHGPGNEKSRTDYGRFRTDGTTLENIFGILIGKCNFYPDEYRASKASYTAQEYNFLNDLNNLKVSTETGKLSTEQKESLVEFAKNTATLGPAKLLKEIAKILDCKVDEIKGYREDDKGKPDLHTFEPYRKLKFNLESINIDDLSREVIDKLADILTLNTEREGIEDAIKRNLPNQFTEEQISEIIKVRKSQSTAFNKGWHSFSAKLMNELIPELYATSDEQMTILTRLEKFKVNKKSSKNTKTIDEKEVTDEIYNPVVAKSVRQTIKIINAAVKKYGDFDKIVIEMPRDKNADDEKKFIDKRNKENKKEKDDALKRAAYLYNSSDKLPDEVFHGNKQLETKIRLWYQQGERCLYSGKPISIQELVHNSNNFEIDHILPLSLSFDDSLANKVLVYAWTNQEKGQKTPYQVIDSMDAAWSFREMKDYVLKQKGLGKKKRDYLLTTENIDKIEVKKKFIERNLVDTRYASRVVLNSLQSALRELGKDTKVSVVRGQFTSQLRRKWKIDKSRETYHHHAVDALIIAASSQLKLWEKQDNPMFVDYGKNQVVDKQTGEILSVSDDEYKELVFQPPYQGFVNTISSKGFEDEILFSYQVDSKYNRKVSDATIYSTRKAKIGKDKKEETYVLGKIKDIYSQNGFDTFIKKYNKDKTQFLMYQKDSLTWENVIEVILRDYPTTKKSEDGKNDVKCNPFEEYRRENGLICKYSKKGKGTPIKSLKYYDKKLGNCIDITPEESRNKVILQSINPWRADVYFNPETLKYELMGLKYSDLSFEKGTGNYHISQEKYDAIKEKEGIGKKSEFKFTLYRNDLILIKDIASGEQEIYRFLSRTMPNVNHYVELKPYDKEKFDNVQELVEALGEADKVGRCIKGLNKPNISIYKVRTDVLGNKYFVKKKGDKPKLDFKNNKK

SEQ ID NO: 223 - protein, 1119 aa, Lactobacillus coryniformis
MGYRIGLDVGITSTGYAVLKTDKNGLPYKILTLDSVIYPRAENPQTGASLAEPRRIKRGLRRRTRRTKFRKQRTQQLFIHSGLLSKPEIEQILATPQAKYSVYELRVAGLDRRLTNSELFRVLYFFIGHRGFKSNRKAELNPENEADKKQMGQLLNSIEEIRKAIAEKGYRTVGELYLKDPKYNDHKRNKGYIDGYLSTPNRQMLVDEIKQILDKQRELGNEKLTDEFYATYLLGDENRAGIFQAQRDFDEGPGAGPYAGDQIKKMVGKDIFEPTEDRAAKATYTFQYFNLLQKMTSLNYQNTTGDTWHTLNGLDRQAIIDAVFAKAEKPTKTYKPTDFGELRKLLKLPDDARFNLVNYGSLQTQKEIETVEKKTRFVDFKAYHDLVKVLPEEMWQSRQLLDHIGTALTLYSSDKRRRRYFAEELNLPAELIEKLLPLNFSKFGHLSIKSMQNIIPYLEMGQVYSEATTNTGYDFRKKQISKDTIREEITNPVVRRAVTKTIKIVEQIIRRYGKPDGINIELARELGRNFKERGDIQKRQDKNRQTNDKIAAELTELGIPVNGQNIIRYKLHKEQNGVDPYTGDQIPFERAFSEGYEVDHIIPYSISWDDSYTNKVLTSAKCNREKGNRIPMVYLANNEQRLNALTNIADNIIRNSRKRQKLLKQKLSDEELKDWKQRNINDTRFITRVLYNYFRQAIEFNPELEKKQRVLPLNGEVTSKIRSRWGFLKVREDGDLHHAIDATVIAAITPKFIQQVTKYSQHQEVKNNQALWHDAEIKDAEYAAEAQRMDADLFNKIFNGFPLPWPEFLDELLARISDNPVEMMKSRSWNTYTPIEIAKLKPVFVVRLANHKISGPAHLDTIRSAKLFDEKGIVLSRVSITKLKINKKGQVATGDGIYDPENSNNGDKVVYSAIRQALEAHNGSGELAFPDGYLEYVDHGTKKLVRKVRVAKKVSLPVRLKNKAAADNGSMVRIDVFNTGKKFVFVPIYIKDTVEQVLPNKAIARGKSLWYQITESDQFCFSLYPGDMVHIESKTGIKPKYSNKENNTSVVPIKNFYGYFDGADIATASILVRAHDSSYTARSIGIAGLLKFEKYQVDYFGRYHKVHEKKRQLFVKRDE

SEQ ID NO: 224 - protein, 1126 aa, Lactobacillus farciminis
MADRISLGLDIGVASVGFSVLDIDKGKVIELGARLFSATVAAGNQDRRDMRGARRLLNRNKQRRQDTGKLFKKFGLIDDFDKGSFYDNFNQNLNPYELRVKGLTEQLTKEELAESLYQIVKHRGISYALKDADVDEGGTDYSVSLKINSQELAEKTPAQIQLQRLNDYGKVRGQVVIGDDPDNQKVLLNVFPTSAYEKEAKQIIATQQQFYPESLTDKFTEEYCQILTRKRDYFVGPGNEKSRTDYGIYKTDGRTLDNLFEELIGHDKIYPEELRASAASYTAQLFNVLNDLNNLRILNYEDGKLTKEDKEKIIAEIKNNTTTINMLNVIKKVAGCSKDDIKGFRVNEKDKPEISSMPVYRKIHKDLLKAGVDISDWPVEFIDELSFILTLNTENGEIRKQLNNRLAPKFDFLNADLIQLIIDNKDSFEIKTNNKWHRFSVKTMNKLIPEMMERPVEQMTLLNEMGLVKKDKKRFENNKYLPYKEIAKDIFNPVASKSVREALKIVNAVLKKYGHIDYLVVEMPRDKNLKEEQDNIKEFQNKNKKAKDAAFEAFVKSVGSEQRVKEALSKNRKLQMKMRLWYQQQEIDPYNGKTIDATDLINNPDKFEIDHIIPQSISFYDSINNKTLCFASMNQVKGQKTPYEFMLEGHGQSYDKFKATVMANKNFGKAKRANYLFEENVSDIETRKRFLSRNLVDTRYSSRVVLNSLQDFFREKSADTKVTVIRGKFTSNMRKHWHIDKTRETFHHHAIDASIIAATPFLRMWKKGGTIFPVKVGEESIDIETGEILDDKNFDKAMYEEPYSGFVSEIMNADDRIKFSHQVDKKMNRKVSDATIYSTRTGKLAKDKKDAEYIVAKVKDIYSVDGFKKFKKVYDKDKTKFLLYKYDPRTFSKLERIISDCPDKVEKVQTNGKVKAVDISPFEMYRRDHGMIKKYSKKGNGPAIKQLKYLDKKLGSHIDITPANANGKHVILQSLKPWRTDVYLNHETGEYEIMGIKYSDLKFNKNEGYGIKKDKYLEIKKVEEVSEKSEFMFSLYRKDRVKVQDMKTGESVELLFWSRNFSNKKYAELKPISQAENDKKLPVYGKGRLIKRLIPKNCKIWKVNTTILGDPYYLEKESDSPKDILD

SEQ ID NO: 225 - protein, 1380 aa, Eggerthella sp.
MNLRHVGNYNIGLDMGTASVGWAAIDEQGELLHFKGKPTWGSRLFDSANTAATARMPRGQRRRYIRRRWRLDLLQKFFSEEMAEKDPEFFIRLRQSSLWPEDREGGHTAYHWPLFNDSDFNEKEYYEKFPTIFHLRQWLMETDEKADIRLIYLAFHNIVKHRGNFLQENNDSLSAQNANMRESLESFCIALEEWCDEKELTCSCDPQKLEHLFKEVKYRSDIRDGFAALLGLACSGENEVDVKAMAKEMGKAIVGYKADFSKIFTECDKEGSSFRLSDDEGPEAFLDICPDDGIALFEAIQMVYSSFILTGMLTEKGLSLSKISAYNQYGQDLESLKALVKEYVPNEYSSFFRGPTYSGSTEYDPSKAQGYTRYNLGPSKKGSGAKPMAYEDFKKSVEQLFANTNAINDERYKEMMGRFAEEKFLRRLRTSDNGRIPFQLNLEEMTAIIINQGKYYPFLLEQQEKLESLVRFRIPYYVGPLTRINARLDSKGNACFAWSKRKDGMDSASIKPWNWDEVIDKHASAQAFIERMTGTCTYLRGEPVLPRCSLLYEEYCVLNELNGARWTQDGDKFIRFDYKDRSDIIEELFKKRRGRIQYAAVADWMKQERSHANVHVSGGQGENAFESRLSSYHFFCNDVFGVDELPGSYVDMVEEIILWSTLFEDRSILREEIQRKYGDVLNEEQIKTICKKRFSGWGRLSRKLLCSLKAQTDNGPKSIMDILQEGDQNNGRVGRAMVFQEILHDEQLGFEQKIEEENTQSMLEGENLLIEDLPGSPAIRRSINQAVRIVDEIVGIAGHAPDNIFIEVTREDDTKKKGKRTTTRYSNIQKALEALKEEGAEALRELKTYKHNELDKRLSLYFMQNGKSLYSGIPLDIRRLSEYQIDHIIPQSYIKDDSYENMALVLPGENQSKADNLLISQDIRIKMKATWTALHKAGLMGDKKYNNLMNSSISDAKMKGFINRQLVETSQSVKLTQMMLSQKYPGAKVRPIKASISSQLRDACDLVKCREANDYHHAHDAYLACQVGRFVLKRHSSMFDNPIGMTKVIRDFVKRQGQEFKRNGKLPAYASRSGFIVQSFMRSGFDAETGELLRDDWNAPFEIARIKRCLNYRDCYISRMPMEDSGAFWDATIYSPKAGKKGALPVKQGLPVEKYGSYSREQFAYFFVYKAYNPKKKAYRLEFEAVPVRVASAVETRENALEEYAKSVAKQAGLEFVEVARPKVYKYQLIELGEDRLYITGKREVRNASQLAFSLDEIDLLKRLAEGEETSSEERERLFDVLIEKYARYAPRLARQLSVDSMSATFETLNAEEQLGILLSLVEIANGKRNMIDLSSAGGSKNAGCMNPTFSSELSSPGSNFTFIDQSVTGMFERRQRLEL

SEQ ID NO: 226 - protein, 1430 aa, Capnocytophaga canimorsus
MKHILGLDLGTNSIGWAVVKEAQNDNEQSEIVDVGVRVNPLTTDEKTNFEKGKPISTNADRTLKRSARRNLQRYKLRRKELIELLKEHQLISTDTILTENGKGTTFQTLELRAKSAKEKISLEELARVFLTINKKRGYKSSRKAKNEDEGQLIDGMEIAKRLYEENLTTGQLSLQLLKEGKKSLPDYYRSDLQFELDKVWNFQKQFHSHILTDEFYAQLKGKGQRATSALFLAKYQIYTAENKGSREDKKLQAYQWRVDALSKELTREQLAFVITEINNNLNNSSGYLGAISDRSKELYFNNETVGEYLWKQIAANPHTSLKNQVFYRQDYLDEFEQIWKTQSAFYPEILTDELKKELRDVVIFYQRKLKSQKSLVSFCEFENKEIEIKKEDGTSTKKVIGLKVAPKSSPLFQEFKIWQNLNNVLIRKKGSKTKKVDKNQQAVLFEEEKTIFELDLEAKQALFNELNLKGNLKAYYCLEILGYSPKEWEMNYSVLEGNRTNKALYEAYLKITDLEGYDAKNHLKVKLNKDEVELDDLKVPASEIKDMVQAIFKEAGINTDILHFNAELDGKDFENQASYQLWHLLYSYEGDDSKSGNELLYKLLETKFGFKKEYAQILANVSLSDDYGSLSTKAMRKIHPYIKENKFSTACELAGYRHSKHSLTKEENDNRVLKDSLEVLKKNSLRQPVVEKILNQMINLVNALLKKYRTENPNFKFDEIRIELARELKKNAEERANMTVNINKAKTEHEKIIKILKNEFGLPNPTRNDIIRYRLYEELKANGYKDLYTNEYIEKQDLFTKNIDIEHIIPKSRVFDDSFSNKTLSFRKTNLDKGERTAFDYIESKFGADKLEEYVARVEDLYKNNIISKAKYQKLLKKESEIGDGFVERDLRETQYIAKKAKEILLQITPNVLSTSGGITDRLREDWDLINVMKELNLPKYRALGLTQMEDRKYGQQVEVIIDWTKRNDHRHHAMDALTVAFTKHNHIQYLNYLNARKNEKHREHSNIMGIQQLETIKVTDKNGNEKRVFKAPMPNFRQVTKAFLENVLISHKAKNKVVTKNKNKVAGSNKVQEVLTPRGQLHKETVYGKYQYYVQKEEKIGGKFDLETIKKVANPLYQSLLKKRLEENGGDPKKAFTGKNSLAKNPIYLDDAQTEQLPEKVKLVWLENSFSIRKDITPENFKDEKLIDKILDEGVKRILKERLQSFGNDAKKAFSDLDKNPIWLNKEKGIAIKRVAISGVANAEPLHTKKDHLGKEILDKEGKSIPVDFISTGNNHHVAVYRDEKGNLQEKVVSVFEAVVRANQGLPIIDKTYNQHLGWEFLFTMKQNEMFVFSNESTGFNPNDIDLLDPKNKKIISPNLFRVQKFSKLQYGNSFVREFVFRHHLETTVEDRKELQGITYKQMKNSAFFNDIIKVRINHLGGIVSVGEY

SEQ ID NO: 227 - protein, 1348 aa, Finegoldia magna
MKSEKKYYIGLDVGTNSVGWAVTDEFYNILRAKGKDLWGVRLFEKAKTAADTRTFRSGRRRNDRKGVRLQILREIFEDEIKKVDKDFYDRLDESKFWAEDKKVSGKYSLFNDKNFSDKQYFEKFPTIFHLRKYLMEEHGKVDIRYYFLAINQMMKRRGHFLIDGQISHVTDDKPLKQQLILLINDLLKIELEEEFMDSIFEILADVNEKKTEKKNILKELINAQDFNKQEGKILYSIFESIVTGKAKIKNIISDEDILEKIKEDNKEDFVLTGDSYEENLQYFEEVLQENITLFNTLKSAYDFVILQSILKGKSTLSDAQVERYDEHKKDLEILKKVIKKYDEDGKLFKQVFKEDNGNGYVSYIGYYLNKNKKITAKKKISNIEFTKYVKGILEKQCDCEDEDVKYLLGKIEQENFLLKQISSINSVIPHQIHLFELDKILENLAKYYPSFNNKKEEFTKIEKIRKTFTFRIPYYVGPLNDYHKNNGGNAWIFRNKGEKIRPWNFEKIVDLHKSEEEFIKRMLNQCTYLPEETVLPKSSILYSEYMVLNELNNLRINGKPIDTDVKLKLIEELFKKKTKVTLKSIRDYMIRNNFADKEDFDNSEKNLEIVSNMKSYIDFNNILGDKFELEMVEDLIEKITIHTGNKKLLKKYIEETYPDLSSSQIQKIINLKYKDWGRLSRKLLDGITGTNIETGEIDTVINFLRNSSDNLMQIIGSQNYSFNNDIDKLRKKYIPQEISYEVVENLYVSPSVKKMIWQVIRITEEITKVMGYDPDKIFIEMAKSEEGKKTTISRKNKLLALYKAIKKDERDSQYEKLLTGLNKLDDSDLRSRKLYLYYTQMGRDMYTGEKIDLDKLFDSTHYDKDHIIPQSMKKDDSIINNLVLVNKNANQTTKGNIYPVPSSIRNNPKIYNYWKYLMEKEFISKEKYNRLIRNTPLTNEELGGFINRQLVETRQSTKAIKELFEKFYKKSKIIPVKAILASDLRKDMNTLKSREVNDLHHAHDAFLNIVAGDVWNREFTSNPINYVKENREGDKVKYSLSKYFTRPRKSKGKVIWTPEKGRKLIVDTLNKPSVLISNESHVKKGELFNATIAGKKDYKKGKIYLPLKKDDRLQDVSKYGGYKAINGAFFFLVEHTKSKKRIRSIELFPLHLLSKFYEDKNTVLDYAINVLQLQDPKIIIDKINYRTEIIIDNFSYLISTKSNDGSITVKPNEQMYWRVDEISNLKKIENKYKKDAILTEEDRKIMESYIDKIYQQFKAGKYKNRRTTDTIIEKYEIIDLDTLDNKQLYQLLVAFISLSYKTSNNAVDFTVIGLGTECGKPRITNLPDNTYLVYKSITGIYEKRIRIK

SEQ ID NO: 228 - protein, 1352 aa, Megasphaera sp.
MKKRNREEYYVGLDIGTSSVGWAVATPDYRIPKFRGHKMWGSRLFAEGKRAAERRQFRTNRRRLARRRDRLQILEELFAEEMAKVDNTFFMRLKESKFFLEDKTVKEKHILFSTDKFDADRFYKDNPTIYHVRKRLMEEEPQDIRELFLAVHHILKYRGHFLFAGSLEQNGASIEELVRTLLGKQGLAILDDTIDSNEMVNILKNTGETKSDRKKDVQELWNPLKDKVKKAQAAEMAGLVLGLKSDISKLFANSDYKDLDSSIKNINFSSGDYEEKRDDYANSIGDDIVLLDTMKALYDTLILSQILQGKRSISAAKVEDYNTHKEQLRALKAILKPHKRLYNEMFRENNKKDLSNYVAYISSYSEGKRVNREGFYKYVQAVLKQVDDSDSKQAILEAIRLETFLPLLRVKDNAVIPHQIHQAELEAILETARKKYNFLNDVSDGVSVKDKIIQLFTFRIPYYVGPLNPHSGETVADRKQGTGWVVRKQRGKVYPWNFADMVDVKASAEAFITNLTNKCTYLIGEDVLPKRSLLYSEFMLLNELNMIKYDGHELPVAIKQLYIEQVFKQEHKKQTKGRVLDFLKRNGLITGSATAVITGMDDAIKGDLQSYRDMVRIFGAGFDHSMAERIIRWVTLFGEAKDILENKIREVYGNSISDSQMRAIKKLKYADWGRLSQAFLIAVKGCDKSGVERNIITCLRASSQNLMEILSDQGTYIKQIKAWNHQHTTNMMDTLDYQLVDDLYVAPSVKRSIWQSLCIVEELVKIMGQAPKKIFVEVTRTKQAEKTKKDSRKKRLVELYTAIGKEGAAWKKEIEAHQAGDFRRKKLYLYYTQMGRCMYSNEPIAMDALFTSAYDIDHIYPQSLTKDGSWDNLVLVKSQLNKEKSDQYPLRPAIREKNKAHWQYLCRAGFISEKKYERLMRTTELTAEELSGFIARQLVETSQATKAVTGLLERIYTNTEICFVKAETVSQFRHQHNFIKIRELNNYHHAKDAYLNIVVGNVYHEKFTKNPWEFIARSTERRPYNLNRMYDFDLLKQGRVIWQVPKSLETVQAMMKSNDVRITKKLLVQKGELYDATITKAHKAKEGTYFPLKGADARLRDVHRYGGYEKIKIAYYSVFSCREKASNTIHTLIIPIPVYKAGLLQTEADLTAYAWQTKQKTKPIKDIYSAITPIYKKLCINTVVKIDGFKYFLGGKTGDYMWLDPAIPVVLDEQAAAYLKAISKVGRADDVENTAQAIDLITAEANEAFYDVLLKKMEAKIFAKAYQTIVEKLASETARERFRELSIGAQCSCLLEILNLLANNKTTFTFFKDKMGVTMSRRKQPMDLTKLEECIVYETSITGLYEKAVSLL

SEQ ID NO: 229 - protein, 650 aa, Haemophilus pittmaniae
MENKNLHYILGLDLGIASVGWAVVEIDKEENPLCLIDVGVRTFERAEVPKTGESLALSRRLARSARRLTQRRVARLKKAKRLLKLENILLSTDERLPHQVWQLRVEGLDRKLKRQEWAAVLLHLIKHRGYLSQRKNESKSENKELGALLSGVASNHELLQQTTYRTPAELAVKKFEVEEGHIRNQQGAYTHTFSRLDLLAEMELLFSRQQHFGNPFASEKLLENLTALLMWQKPALSGEAILKMLGKCTFEDEYKAAKNTYTAERFVWITKLNNLRIQENGLERALNDNERLILIEQPYEKAKLTYAQVRSILNLSDEAIFKGLRYSGEDKKAIETKTTLMEMKAYHQIRKVLEGNNLKAEWTELKENSTLLDEIGTAFSLYKTDEDISTYLAGKLSQPVLNALLENLSFDKFIQLSLKALYKLLPLMQQGLRYDEACHEMYGDHYGKKTYGKKTEENHYFLPQIPADEIRNPVVLRTLTQARKVINGVVRLYGSPARIHIETGREVGKSYKDRRELEKRQEENRKQRENAIKEFKEYFPHFAGEPKAKDILKMRLYKQQNAKCLYSGKPIELHRLLEKGYVEVDHALPFSRTWDDSFNNKVLVLANENQNKGNLTPFEWLDGKHNSERWRAFKALVETSAFPYAKNNAS

SEQ ID NO: 230 - protein, 1062 aa, Ralstonia syzygii
MAEKQHRWGLDIGTNSIGWAVIALIEGRPAGLVATGSRIFSDGRNPKDGSSLAVERRGPRQMRRRRDRYLRRRDRFMQALINVGLMPGDAAARKALVTENPYVLRQRGLDQALTLPEFGRALFHLNQRRGFQSNRKTDRATAKESGKVKNAIAAFRAGMGNARTVGEALARRLEDGRPVRARMVGQGKDEHYELYIAREWIAQEFDALWASQQRFHAEVLADAARDRLRAILLFQRKLLPVPVGKCFLEPNQPRVAAALPSAQRFRLMQELNHLRVMTLADKRERPLSFQERNDLLAQLVARPKCGFDMLRKIVFGANKEAYRFTIESERRKELKGCDTAAKLAKVNALGTRWQALSLDEQDRLVCLLLDGENDAVLADALREHYGLTDAQIDTLLGLSFEDGHMRLGRSALLRVLDALESGRDEQGLPLSYDKAVVAAGYPAHTADLENGERDALPYYGELLWRYTQDAPTAKNDAERKFGKIANPTVHIGLNQLRKLVNALIQRYGKPAQIVVELARNLKAGLEEKERIKKQQTANLERNERIRQKLQDAGVPDNRENRLRMRLFEELGQGNGLGTPCIYSGRQISLQRLFSNDVQVDHILPFSKTLDDSFANKVLAQHDANRYKGNRGPFEAFGANRDGYAWDDIRARAAVLPRNKRNRFAETAMQDWLHNETDFLARQLTDTAYLSRVARQYLTAICSKDDVYVSPGRLTAMLRAKWGLNRVLDGVMEEQGRPAVKNRDDHRHHAIDAVVIGATDRAMLQQVATLAARAREQDAERLIGDMPTPWPNFLEDVRAAVARCVVSHKPDHGPEGGLHNDTAYGIVAGPFEDGRYRVRHRVSLFDLKPGDLSNVRCDAPLQAELEPIFEQDDARAREVALTALAERYRQRKVWLEELMSVLPIRPRGEDGKTLPDSAPYKAYKGDSNYCYELFINERGRWDGELISTFRANQAAYRRFRNDPARFRRYTAGGRPLLMRLCINDYIAVGTAAERTIFRVVKMSENKITLAEHFEGGTLKQRDADKDDPFKYLTKSPGALRDLGARRIFVDLIGRVLDPGIKGD

SEQ ID NO: 231 - protein, 1052 aa, Haemophilus parainfluenzae
MENKNLHYILGLDLGIASVGWAVVEIDEKENPLRLIDVGVRTFERAETQKGESLALSRRSARSARRLTQRRVARLKKAKRLLKSENILLSTDERLPHQVWQLRVEGLDRKLERQEWAAVLLHLIKHRGYLSQRKNESKSENKELGALLSGVASNHELLQQATYRTPAELAVKKFEVEEGHIRNQQGAYTHTFSRLDLLAEMELLFSRQQHFGNPFASEKLLENLTALLMWQKPALSGEDILKMLGKCTFEDEYKAAKNTYTAERFVWITKLNNLRIQENGLERALSDNERLMLIEQPYEKAKLTYAQVRSILNLSDDAIFKGVRYSGEDKKAIETKTTLMEMKAYHQIRKVLEGNNLKAEWVALKANPTLLDEIGTAFSLYKTDEDISAYLAGKLSQPVLNALLENLSFDKFIQLSLKALYKLLPLMQQGLRYDEACREIYGDHYGKKTEETHHFLPQIPADEIRNPVVLRTLTQARKVINGVVRLYGSPARIHIETGREVGKSYKDRHELKKRQEENRKQREKTISEIKTLFPNFSGEPKGKDILKMRLYYQQNAKCLYSGKPLELHRLFEQKYVEVDHALPLSRTWDDSFNNKVLVLANENQNKGNLTPFEWLDGKNNSERWRTFKALVETSAFPYAKKQRILSQKLDEKGFIERNLNDTRYVARFLCNFIADNMHLTGEGKRKVFASNGQITALLRRRWGLAKSREDNDRHHALDAVLVACSTVAMQQKITRFVRFKAGDVFTGERIDRETGEIIPLHFPTPWQFFKQEVEIRIFSDNPKLELENRLPDRPQANHEFVQPLFVSRMPTRKMTGQGHMETVKSAKRLNEGISMIKMPLTKLKLKDLELMVNREREKDLYDALKTRLEAFNDDPAKAFAEPFMKKGGAIVKSVRVEQVQKSGVLVRQGNGVADNASMVRVDVFTKDGKYFLVPIYTWQVAKGILPNKAVIQGKDEEDWEDIDDATFQFSLHPNDLISVKTKKDEFLGYFNGLNRHTGGINIRTHDLEKSKGKQGIFEGIGVKIALSFEKYQIDELGKNIRLCKPSKRQPVR

SEQ ID NO: 232 - protein, 1331 aa, Lactobacillus sanfranciscensis
MNKQPYNIGLDIGTSSVGWSATELDNRLLHIKGHNGIGVRLFKEGESAADRRGFRTTRRRLARRKWRLRLLNEIFATEIAKVDPSFFARLKQSNVSPKDPNKTMFENILFDDENLDDQKFHHDYKTIYHLRQAIINHPEQKFDIRLIYLAMHHIIKYRGHFLNQANVQDFKGGKIDLEKSFKALNDIFENQGRDLRLVTDKANQYVKVLSDNAKTRSDRKKELSKLLYVPIDKDTDKNSKKVTGEILKAILGNKAKFDVIFGIEVENPKEWVLTFNSDDFDDKIEGLSSQMTDEDSEILLILKELYFALNLSDILNNSVTDKNAKTLSEAMINRYDDHKNQLAMLKKVIDSSDKKHAKELKEAYSAYIDGENNKKISFEDLKKRIQKNLVDSELSQKINDLLDHDYFLPKQRSKENGAIPHQLQQQELDQIIESQKQYYPFLAELNPNEKRSRQAKYKLDELVAFRVPYYVGPMVEVTDSNQENNGKFAWMIRKEQGEITPWNFDEKVDRTETATKFITRMTTTDTYLIGEPVLPKNSLLYQKFVVLNELNNLKINQEIITPGQKQYLYEHVMKKNKRVTLKKIADALVIKGDYPYAPEVKGTTDQKNLNNGLTTYIDLAKIFGNELDDVDREADFEKIIEWSTIFEDQHIFALKLQELKWLTEKQRNQVVKLRYQGWGKLSKELLAGLVDDNGQRIIDLLWSDNQNFMQIVNQKSFKESIADHNGAHLEEKNLKDVINDLYTSPQNKKAIRQVILVVDDIINAVGYEPANIMMEFAREDSNDHRLTNSRSRQLENVYKDITNSWFDNDSVKDELEDKIKNKDKFTDRLYLYFTQGGKDLYTGEPLNIDDLSSYDIDHILPQSFILDNSLDNRVLTSQRNNRVSKEDQLPGELFGTKMHAFWKRLKAAHLISNKKYYNLTLTPNSISKFNNQGRFINRQLVETRQVIKLAAEILHNRYSEEKGTNIVTIKANLTHHMREKFNFYKNRNVNDYHHAFDAYLTAFVGNWLLQQYPKLKPYFVYGDFAKTEINNLKSFNMLYKFEQAHQLNEKDGKIAKDADALLGYMKNVYHFKKMLVTKKLETNHGALFKQTLYPSPAHDIKKRQLIKPKDNRPTDIYGGYTHEERKYMSLVKVIGKKDNEYRMANVPLLKINKNNDIKEILKSQFSNKKFEIVLPKVLKNQLFSENGALFVIGSKGYKYNANQLVLSDLDMKLLNDLSNNKSIDEVTINQLFKNIVDSTNKYMPLYEIKNLNEVVEKFNNLEFNDKKKTITDFLLATHANPTMSNLKNIGLPSYFGRFTSGNAGIKLSENANVIYQSPTGLFSRKVKISDF

SEQ ID NO: 233 - protein, 1473 aa, Flavobacterium branchiophilum
MAKILGLDLGTNSIGWAVVERENIDFSLIDKGVRIFSEGVKSEKGIESSRAAERTGYRSARKIKYRRKLRKYETLKVLSLNRMCPLSIEEVEEWKKSGFKDYPLNPEFLKWLSTDEESNVNPYFFRDRASKHKVSLFELGRAFYHIAQRRGFLSNRLDQSAEGILEEHCPKIEAIVEDLISIDEISTNITDYFFETGILDSNEKNGYAKDLDEGDKKLVSLYKSLLAILKKNESDFENCKSEIIERLNKKDVLGKVKGKIKDISQAMLDGNYKTLGQYFYSLYSKEKIRNQYTSREEHYLSEFITICKVQGIDQINEEEKINEKKFDGLAKDLYKAIFFQRPLKSQKGLIGKCSFEKSKSRCAISHPDFEEYRMWTYLNTIKIGTQSDKKLRFLTQDEKLKLVPKFYRKNDFNFDVLAKELIEKGSSFGFYKSSKKNDFFYWFNYKPTDTVAACQVAASLKNAIGEDWKTKSFKYQTINSNKEQVSRTVDYKDLWHLLTVATSDVYLYEFAIDKLGLDEKNAKAFSKTKLKKDFASLSLSAINKILPYLKEGLLYSHAVFVANIENIVDENIWKDEKQRDYIKTQISEIIENYTLEKSRFEIINGLLKEYKSENEDGKRVYYSKEAEQSFENDLKKKLVLFYKSNEIENKEQQETIFNELLPIFIQQLKDYEFIKIQRLDQKVLIFLKGKNETGQIFCTEEKGTAEEKEKKIKNRLKKLYHPSDIEKFKKKIIKDEFGNEKIVLGSPLTPSIKNPMAMRALHQLRKVLNALILEGQIDEKTIIHIEMARELNDANKRKGIQDYQNDNKKFREDAIKEIKKLYFEDCKKEVEPTEDDILRYQLWMEQNRSEIYEEGKNISICDIIGSNPAYDIEHTIPRSRSQDNSQMNKTLCSQRFNREVKKQSMPIELNNHLEILPRIAHWKEEADNLTREIEIISRSIKAAATKEIKDKKIRRRHYLTLKRDYLQGKYDRFIWEEPKVGFKNSQIPDTGIITKYAQAYLKSYFKKVESVKGGMVAEFRKIWGIQESFIDENGMKHYKVKDRSKHTHHTIDAITIACMTKEKYDVLAHAWTLEDQQNKKEARSIIEASKPWKTFKEDLLKIEEEILVSHYTPDNVKKQAKKIVRVRGKKQFVAEVERDVNGKAVPKKAASGKTIYKLDGEGKKLPRLQQGDTIRGSLHQDSIYGAIKNPLNTDEIKYVIRKDLESIKGSDVESIVDEVVKEKIKEAIANKVLLLSSNAQQKNKLVGTVWMNEEKRIAINKVRIYANSVKNPLHIKEHSLLSKSKHVHKQKVYGQNDENYAMAIYELDGKRDFELINIFNLAKLIKQGQGFYPLHKKKEIKGKIVFVPIEKRNKRDVVLKRGQQVVFYDKEVENPKDISEIVDFKGRIYIIEGLSIQRIVRPSGKVDEYGVIMLRYFKEARKADDIKQDNFKPDGVFKLGENKPTRKMNHNQFTAFVEGIDFKVLPSGKFEKI

SEQ ID NO: 234 - protein, 933 aa, Mycoplasma iowae
SVRDYSDGPGSEKSPTPYGLWRLNKEGKVEKIGENLWDVLVGKCTIYGNDDSIKDEKTKLRGGKNSPIAEVFNFINDLTNIYLFSSSKLKLNSKTKLSILDEFNISLKTSKPIKSFSEKKLVKHIISTTEFKDINFDDVYGYRIDTSKKPLFTKLENTITIAKWLLDNNVYNELNIYDQEDLIKINNIFVILQKSMDINKRAQLVSDEYKIDLPICLELVKKIKGVMQTHSFSYKAMLEYIPVGIKYNDLETGEDTSINASTYFVDKINNLNTKLLFNGRPRKYIPKNIFEDGIISPTSKRAFIQTINVLNKIIKVYSKDYDIDNIAIELPRDKNTAEERKKISSNQKKAGEEIAEVLKFAGLNVEEYTSKLNSKTKLKLKLLKEQNYKDIYDGQEIDVIDVIKNSNKYHEEHIIPYSLCFIDSRRNKVLTKFENNKQKGNKTPFQWLSSIGKYAEFKDRVEKLFVEQKISKAKKELLLFEQDPRTEMLGFIEKNLSDTRYASKLVFDTFRDFFKVNNPNVKIKVINGALTNYARYNLFATYKDGLLERKGIMKQREFYEHHGIDATILAFLGSNHKINQLLKLSHKFKKQDDNKIYDENTGELIEFTKDFLSDEARKKAMELSKQIFEIPCKFSRPIYRKSNVSFSNETLISMKWIDDKYTKGVKINKLSLVNKDLDLNEYFADYETNEMKNLICYQEDKTLYNKLKNIYDKYNNFVENSNIKPVKNPFINYMISNFSSDDSKIQNFKHIIFYDHKGNKKFVKSLKVCGDEKNLSNIVLRKDQKDIMNSKKIKKSGILESLNPISARIYKDNKGKYITIPINSLVLNWTKKGLEIDNEKLCNILKSKNIFNNQFIEINAGQSIINNENKLFYFVGGGDFKVNKLEIKSQFCDNEIFFPRKQMNISIATIIDNYKLCEVDELGKIYNIRKIVL

SEQ ID NO: 235 - protein, 1358 aa, Acidaminococcus intestini; identical to SEQ ID NO: 99

SEQ ID NO: 236 - protein, 983 aa, Campylobacter jejuni
MARILAFDIGISSIGWAFSENDELKDCGVRIFTKAENPKTGESLALPRRLARSARKRLARRKARLNHLKHLIANEFKLNYEDYQSFDESLAKAYKGSLISPYELRFRALNELLSKQDFARVILHIAKRRGYDDIKNSDDKEKGAILKAIKQNEEKLANYQSVGEYLYKEYFQKFKENSKEFTNVRNKKESYERCIAQSFLKDELKLIFKKQREFGFSFSKKFEEEVLSVAFYKRALKDFSHLVGNCSFFTDEKRAPKNSPLAFMFVALTRIINLLNNLKNTEGILYTKDDLNALLNEVLKNGTLTYKQTKKLLGLSDDYEFKGEKGTYFIEFKKYKEFIKALGEHNLSQDDLNEIAKDITLIKDEIKLKKALAKYDLNQNQIDSLSKLEFKDHLNISFKALKLVTPLMLEGKKYDEACNELNLKVAINEDKKDFLPAFNETYYKDEVTNPVVLRAIKEYRKVLNALLKKYGKVHKINIELAREVGKNHSQRAKIEKEQNENYKAKKDAELECEKLGLKINSKNILKLRLFKEQKEFCAYSGEKIKISDLQDEKMLEIDHIYPYSRSFDDSYMNKVLVFTKQNQEKLNQTPFEAFGNDSAKWQKIEVLAKNLPTKKQKRILDKNYKDKEQKNFKDRNLNDTRYIARLVLNYTKDYLDFLPLSDDENTKLNDTQKGSKVHVEAKSGMLTSALRHTWGFSAKDRNNHLHHAIDAVIIAYANNSIVKAFSDFKKEQESNSAELYAKKISELDYKNKRKFFEPFSGFRQKVLDKIDEIFVSKPERKKPSGALHEETFRKEEFYQSYGGKEGVLKALELGKIRKVNGKIVKNGDMFRVDIFKHKKTNKFYAVPIYTMDFALKVLPNKAVARSKKGEIKDWILMDENYEFCFSLYKDSLILIQTKDMQEPEFVYYNAFTSSTVSLIVSKHDNKFETLSKNQKILFKNANEKEVIAKSIGIQNLKVFEKYIVSALGEVTKAEFRQREDFKK

SEQ ID NO: 237 - protein, 1338 aa, Streptococcus macacae
MTKPYSIGLDIGTNSVGWAVVTDGYKVPAKKMKVLGNTDKSHIKKNLLGALLFDSGNTAKDRRLKRTARRRYTRRRNRILYLQEIFAEEMAKADESFFQRLNESFLTNDDKEFDSHPIFGNKAEEEAHHHKFPTIFHLRKHLADSTEKSDLRLIYLALAHMIKFRGHFLIEGQLKAENTNVQTLFDDFVEVYDKTVEESHLSEISVSSILTEKISKSRRLENLIKYYPTEKKNTLFGNLIALSLGLQPNFKTNFKLSEDAKLQFSKDTYEEDLGELLGKIGDNYADLFISAKNLYDAILLSGILTIDDNTTKAPLSASMIKRYEEHQEDLAQLKKFIRQNLPDQYSEVFSDKTKDGYAGYIDGKTNQEAFYKYIKNMLSKTEGADYFLDKIDREDFLRKQRTFDNGSVPHQIHLQEMHAILRRQGEYYPFLKENQDKIEKILTFRIPYYVGPLARKGSRFAWAEYKADKKVTPWNFDDILDKEKSAEEFITRMTLNDLYLPEEKVLPKHSLVYETFNVYNELTKVKYVNEQGKAIFFDANMKQEIFDHVFKENRKVTKDKLLNYLNKEFEEFRIVNLTGLDKENKAFNSSLGTYHDLRKILDKSFLDDKVNEKIIEDIIQTLTLFEDREMIRQRLQKYSDIFTTQQLKKLERRHYTGWGRLSAKLINGIRDKQSNKTILGYLIDDGYSNRNFMQLINDDSLPFKEEIARAQVIGETDDLNQLVSDIAGSPAIKKGILQSLKIVDELVKVMGHNPANIVIEMARENQTTAKGRRSSQQRYKRLEEAIKNLDHDLNHKILKEHPTDNQALQNDRLFLYYLQNGRDMYTEDPLDINRLSDYDIDHIIPQSFIKDDSIDNKVLVSSAKNRGKSDNVPSEDVVNRMRPFWNKLLSCGLISQRKYSNLTKKELKPDDKAGFIKRQLVETRQITKHVAQILDARFNTKRDENKKVIRDVKIITLKSNLVSQFRKDFKFYKVREINDYHHAHDAYLNAVIGKALLDVYPQLEPEFVYGEYPHFHGYKENKATAKKFFYSNIMNFFKKDDIRTDENGEIVWKKDEHISNIKRVLSYPQVNIVKKVEIQTVGQNGGLFDDNPKSPLEVTPSKLVPLKKELNPKKYGGYQKPTTAYPVLLITDTKQLIPISVMNKKQFEQNPVKFLRDRGYQQVGKNDFIKLPKYTLVDIGDGIKRLWASSKEIHKGNQLVVSKKSQILLYHAHHLDSDLSNDYLQNHNQQFDVLFNEIISFSKKCKLGKEHIQKIENVYSNKKNSASIEELAESFIKLLGFTQLGATSPFNFLGVKLNQKQYKGKKDYILPCTEGTLIRQSITGLYETRVDLSKIGED

SEQ ID NO: 238 - protein, 1265 aa, Mycoplasma ovipneumoniae
MHNKKNITIGFDLGIASIGWAIIDSTTSKILDWGTRTFEERKTANERRAFRSTRRNIRRKAYRNQRFINLILKYKDLFELKNISDIQRANKKDTENYEKIISFFTEIYKKCAAKHSNILEVKVKALDSKIEKLDLIWILHDYLENRGFFYDLEEENVADKYEGIEHPSILLYDFFKKNGFFKSNSSIPKDLGGYSFSNLQWVNEIKKLFEVQEINPEFSEKFLNLFTSVRDYAKGPGSEHSASEYGIFQKDEKGKVFKKYDNIWDKTIGKCSFFVEENRSPVNYPSYEIFNLLNQLINLSTDLKTTNKKIWQLSSNDRNELLDELLKVKEKAKIISISLKKNEIKKIILKDFGFEKSDIDDQDTIEGRKIIKEEPTTKLEVTKHLLATIYSHSSDSNWININNILEFLPYLDAICIILDREKSRGQDEVLKKLTEKNIFEVLKIDREKQLDFVKSIFSNTKFNFKKIGNFSLKAIREFLPKMFEQNKNSEYLKWKDEEIRRKWEEQKSKLGKTDKKTKYLNPRIFQDEIISPGTKNTFEQAVLVLNQIIKKYSKENIIDAIIIESPREKNDKKTIEEIKKRNKKGKGKTLEKLFQILNLENKGYKLSDLETKPAKLLDRLRFYHQQDGIDLYTLDKINIDQLINGSQKYEIEHIIPYSMSYDNSQANKILTEKAENLKKGKLIASEYIKRNGDEFYNKYYEKAKELFINKYKKNKKLDSYVDLDEDSAKNRFRFLTLQDYDEFQVEFLARNLNDTRYSTKLFYHALVEHFENNEFFTYIDENSSKHKVKISTIKGHVTKYFRAKPVQKNNGPNENLNNNKPEKIEKNRENNEHHAVDAAIVAIIGNKNPQIANLLTLADNKTDKKFLLHDENYKENIETGELVKIPKFEVDKLAKVEDLKKIIQEKYEEAKKHTAIKFSRKTRTILNGGLSDETLYGFKYDEKEDKYFKIIKKKLVTSKNEELKKYFENPFGKKADGKSEYTVLMAQSHLSEFNKLKEIFEKYNGFSNKTGNAFVEYMNDLALKEPTLKAEIESAKSVEKLLYYNFKPSDQFTYHDNINNKSFKRFYKNIRIIEYKSIPIKFKILSKHDGGKSFKDTLFSLYSLVYKVYENGKESYKSIPVTSQMRNFGIDEFDFLDENLYNKEKLDIYKSDFAKPIPVNCKPVFVLKKGSILKKKSLDIDDFKETKETEEGNYYFISTISKRFNRDTAYGLKPLKLSVVKPVAEPSTNPIFKEYIPIHLDELGNEYPVKIKEHTDDEKLMCTIK

SEQ ID NO: 239 - protein, 1535 aa, Flavobacterium columnare
MTKILGLDLGTNSIGWAIRDTENEGINQILDKGARIFSEGVKSENGKEISRAAERTAYRSARKIKYRRKLRKYETLKVLSINGMCPLSVEEVEQWKKSGFKEYPLNPEFLDWLRTNEDKNINPYLFRDKASKQKVTLFELGRALYHIAQRRGFLSNRLDQSAEGVFEEHNPQIQNLIEDLDSSNTILNELKEYYINLGIIDETEKSGFKKDLDEGEKKLKSLYNSLVAITKKNANDIETCKQELIARLNKKEDLGKVKGKIKDISQAMLDRNFKTLGQYFFSLYNKERIRNQYTSREEHYLEEFIIICQTQGIEGINTNEKLPEKKFTGLAKDLYRAIFFQRPLKSQKGLIGKCSFEKNKSRCAVSHPDYEEFRMWSYLNTIKIGTQSEKTLRFLTLEEKLKLVPKFYRKSDFNFEVLAKELVEKGASFGYYKSSKKNEFFYWFNYKPTDSVSACVVSASLENAIGKDWKIKTFEYQTRNTEKNEVTKSVDYKDLWHLLSVATSDTYLYDFAIEKLKLEPKNAKAFSKTKLKKDFASLSLAAIAKILPYLKQGLLYSHAVFMANIENIVDADIWKDEEQQKFIQSKIVELVDNYIVEKSKLELINGLLKIYNTEDKEGRKVYYSKEAESLFEADLRKKLVPFYKANIIIEEHEQEIIFQDLFPILMDQLKKQEFIKIGRLDKQIEAFLEGENEEGQIFCNHTDKLKKLYHPSDIEVFKKKTIKDEWGNEKVVLGSPLTTSIKNPMAMRALHQLRKVLNTLIANDQIDEDTRIHIEMARELNDANKRKGIQDFQNENKKFREEAIKEIKKLYLEECHKDVNPTEDDILRYQLWLEQGKCEIYEEGNNISICDIIGSNPSYDIEHTIPRSISQDNSQMNKTLCSLKFNRSIKKQKMPVELSNYNDILPRIAHWKKEAEELTRQIETISRSIKSAATKVAKDKNIRKRHYLTLKRDYILGKYERFTWEEPKVGFKNSQIPDTGIITKYAQAYLKSYFKRVESVKGGAVAEFRKLWGIQESFIDENWWKHYKDKDRDKHTHHTIDAITIACMPKDKYDLLAHAWRLEDEQDKKAAKVLIEQAKPWKTFKEDIEKIETEILVSHFTPDNVKKQSKSIIKNRGKKVYVLKNELPVNFKNKIEGKDYFKLKFDSKILYKIPKKKEKQTDTFYEELPKNYLNGVEGKDYFKINTTGKTFYKIPIFNQGDTIRGSLHQETTYGAIKLPDIDIETKKPLHTDKGGFILKKDIKGNEIVFFVVRKEISKISENDVQNIVDNVVRKKIENAIANSLITFKIVKKKKVAVIKEGVTIWMREPNIEKGIEGIPIKKVRIITNSVKNPIEIKVHSPLSKSRHKHKQKVYGQNDENYAMALYELDGKREFELINNFNLAKLLKQSQSYYPLHKEKEIKGKKILVPIEKRNNKDVILKRGQQVVFYDKTVENPKDISEIIDFRERIYIIEGLTIQRQKDKKTSKVNEYGIIQLRHFKEARKSEEISKDNFKPDGEFKINENKPTRKMNHNQFTAFVEGIDFKVLPSGKFQKI

SEQ ID NO: 240 - protein, 1459 aa, Flavobacterium columnare
MKFNLGLDIGTNSIGWALVNEDYENKKGKIIAAGSRIIPMTQDILDKFGSGAITETQTALRTDYRSKRKLIQRFLLRRERLHRVLNVLDFLPKHYAESIDFEKYFGKFLPNTEPKLAYNQNQFIFQNSFLEMLKEFQEKHPELLTNNKKIPYDWTIYYLRKKALNQRIEKEELAWLLLQFNQKRGYNQLRDEEEESVPNKQVEFYSLKIIDVVADQPKEGRDKRWYSINLENGWTYRRESKTPLFNWEGKTKDFIVTTDLNQDGSIKKDKEGKEKRSFRAPSEGDWTLLKKKTEKEIYESGKTLGTYIYDALLNTPDLKIKGDFIRTIDRSIYKEELQQIINKQKEYHLELNSSKLYKACLEELYPKNEIYKSALKNKDIAYLFINDILYYQRPLKAPKYNIGKCTYESRTFKKEDKKIREYIPAVAKSHPLFQEFRLWQWIKNLKIYEKLSSDNCTDFFLTNEQDFENLFEFLWNKKEIDHKGILEYLVKTKFPDLKPKQVKTKVKEYRWNYVYDHEKDESKTYPCGETYFLLKNKLDKIYNAQDDFLDKERLYNLWHIIYSVTDKKQYEKALAKFALKNHLDTKSFVNTFKRIPPFKNDYAIYSLKAIKKLLPLMRVGKYWNYDDIDPITKQKIQCIITGEENDTISTLVREKTNHFSNENDFKNLPLWLAGYIVYNSHNESSEIEKWKSPQDIDTFLKKFKQHALRNPIVEQVVTETLRVVRDIWSKKGQGKKDFFNEIHIELGKDLKNPVDKRRKLSSTNTKNESTNTRIKALLIELFTQGVENVKPNSPKHQEILKIFEEGALNSGIEIEEDIIKISNTDQPTKKQLELYILWLEHKYKSPYTGQSIPLSKLFTPNYEIEHIIPRSKYYDDNLSNKVICETEINRLKNNQLGYEFINNHEIREVTLEEGKTIRLLSPEQYWNFVTTYYAKNKAKRENLLLKELPVQMVEKQLNDTRYVSKYVMQLLSKIVRKEDGTDNGINSTNILSISGKMTRALKNDWDLNDVWNDLLLYRFERLNTITKTNLFTTYSEQKQKRMPIVPDQYAKGFHKKRLDHRHHALDAIVIACITRNHINYMNNQNIQGEKLKKNAIEKENYREILQKSRLDIRAQLCEKKYNDNDPTKYNWVFIKPWADFTENTKDILESIIPSFKQNLRIINKTVNYYEKYNENGKKVKVRQIKGDNWAIRKPLHKETISGKVHLSYKTPAKGKILTATRKVLDSSMDFKSIEKITDTGIQKILKNYLEYKKSPELAFSPEGIEELNATITKYNNGFHHKPIYKVRIYEEGVKFPLGNKGNKKSKYVEAEKGTNLFFAIYKDQENNRYFETIPFNDVLETLKKGMSAVPEKNQEENTLVFALSPQDLVFVPTLDEIENPDIVDFKNLTKDQTNRIYKMVSSSGKQCFFIKAEVATSIVNKMEFSTSNKMENSIEGIQIKSNCWKLKLDRLGTITRVIK

SEQ ID NO: 241 - protein, 1389 aa, Oenococcus kitaharae
MARDYSVGLDIGTSSVGWAAIDNKYHLIRAKSKNLIGVRLFDSAVTAEKRRGYRTTRRRLSRRHWRLRLLNDIFAGPLTDFGDENFLARLKYSWVHPQDQSNQAHFAAGLLFDSKEQDKDFYRKYPTIYHLRLALMNDDQKHDLREVYLAIHHLVKYRGHFLIEGDVKADSAFDVHTFADAIQRYAESNNSDENLLGKIDEKKLSAALTDKHGSKSQRAETAETAFDILDLQSKKQIQAILKSVVGNQANLMAIFGLDSSAISKDEQKNYKFSFDDADIDEKIADSEALLSDTEFEFLCDLKAAFDGLTLKMLLGDDKTVSAAMVRRFNEHQKDWEYIKSHIRNAKNAGNGLYEKSKKFDGINAAYLALQSDNEDDRKKAKKIFQDEISSADIPDDVKADFLKKIDDDQFLPIQRTKNNGTIPHQLHRNELEQIIEKQGIYYPFLKDTYQENSHELNKITALINFRVPYYVGPLVEEEQKIADDGKNIPDPTNHWMVRKSNDTITPWNLSQVVDLDKSGRRFIERLTGTDTYLIGEPTLPKNSLLYQKFDVLQELNNIRVSGRRLDIRAKQDAFEHLFKVQKTVSATNLKDFLVQAGYISEDTQIEGLADVNGKNFNNALTTYNYLVSVLGREFVENPSNEELLEEITELQTVFEDKKVLRRQLDQLDGLSDHNREKLSRKHYTGWGRISKKLLTTKIVQNADKIDNQTFDVPRMNQSIIDTLYNTKMNLMEIINNAEDDFGVRAWIDKQNTTDGDEQDVYSLIDELAGPKEIKRGIVQSFRILDDITKAVGYAPKRVYLEFARKTQESHLTNSRKNQLSTLLKNAGLSELVTQVSQYDAAALQNDRLYLYFLQQGKDMYSGEKLNLDNLSNYDIDHIIPQAYTKDNSLDNRVLVSNITNRRKSDSSNYLPALIDKMRPFWSVLSKQGLLSKHKFANLTRTRDFDDMEKERFIARSLVETRQIIKNVASLIDSHFGGETKAVAIRSSLTADMRRYVDIPKNRDINDYHHAFDALLFSTVGQYTENSGLMKKGQLSDSAGNQYNRYIKEWIHAARLNAQSQRVNPFGFVVGSMRNAAPGKLNPETGEITPEENADWSIADLDYLHKVMNFRKITVTRRLKDQKGQLYDESRYPSVLHDAKSKASINFDKHKPVDLYGGFSSAKPAYAALIKFKNKFRLVNVLRQWTYSDKNSEDYILEQIRGKYPKAEMVLSHIPYGQLVKKDGALVTISSATELHNFEQLWLPLADYKLINTLLKTKEDNLVDILHNRLDLPEMTIESAFYKAFDSILSFAFNRYALHQNALVKLQAHRDDFNALNYEDKQQTLERILDALHASPASSDLKKINLSSGFGRLFSPSHFTLADTDEFIFQSVTGLFSTQKTVAQLYQETK

SEQ ID NO: 242 - protein, 1425 aa, Prevotella micans
MIQKIFGLDLGTNSIGSSVRNLELGENLTEQLEFFSSDIFGSSVSKNSNGREYSLAGNRSAHRRSRGLNEARRRKLWATLDLLIEHGLCPMSPDSLMQWRTYDKQKGLYRQYPIEDKDFNAWIMLDFNGDGKPDYSSPYQLRRELVVRQFDFDQPIERYKLGRALYHIAQHRGFKSSKGETIADQEKNEKKPIAEEGADIANEMKASETKLSKGLVAYMQENHLKTVGEAFAKLEDERVRIRNNESYRAIRSQYQDEIKEIFTYQKKLSVESELYERLTSEKKGVGTIFYKRPLRSQRGNVGKCTLERNKPRCPIGRPEFEEFRAWTLINNIKIRETAGEPYKQLPIKLRQELLKDCFLSKVKADFKFEDIRKYIEKRLGLSFSNDDKTINYKDSVSIAACPVTVRMKKLLGENWANCRIDGEKRRQAHGKNNNNEHIVSYTEEDIWHVCYNAEDPEEVSNFARKALHWDENKIKELVRLWTSIPQGYAMLSLKAIRNINRMLLLGLKYSDAVLLAKLPDIVPVSDEDILAITKEFLQLEDKLNQEKQINNIVNSLIANYKSKLEENRFADHNYQYQLGEGDDEDINTQIKSHIGAKLWVQIGADEQTKIFQAVRSKYQDFFKSYKRKFVESPKLGELLVAFLTEKFPNVKSKQWERLYHPSQIAIYRPIPVDNDRSKLRLGNPNIGAIKNPTVMRVLNTLRRRVNQLLDDGVISPDETRVVVETARELNDANTKWALDRYNRIRRDENEKIRKILKELNPTTNSISEQDIDKARYIFEQCETDFYTDGKVPYYNKDIKKYKLWLEQGGQCLYTGQTINLTNLFNPNAFDMEHTIPKSISFDNSDQNLTLCESYYNRFIKKNNIPTDMPNYDKDVTINGKEYTAIKPRLQRWKERVDRLSRNVDFWKGQARRAQDKDRKDECIREKHLWDMELAYWKGKLERFTMTDVTDGFKNSQLVDTRVITRHAVLYLKSIFNHVEVQRGETTAEFRKILGLQSIDEKKDRSLHSHHAIDATMLTVIPSAAKRDRMLELFYKIEETKKALKNYNDNNKTGLNLELKGLEEKLDKEKKDCRVGRRVNDLDRFINENIIVSHHTKDQALTPAHRRLRKRGKIVGGKEHPRWQTGDSLRGEIHKASYYGAITQFAKDANGKVLMKDGQAQIDPTIYYVIRRELKYKRSTQDSGFTNWEDLEKVIVDTDLFGLMKGQFPEGTSFKDACEQGFYMIKKGKNGEGDVKTHRIRHVRCKAVKTALRIKEQTYKSSKDYKQFFYAAVGDLYVMCYYTDGKKRDFKIYSLYDISNHRKSGTEDIPKFITDKKGNHLPLDYKLRTGDMVLLYKDNPEELKDLDQVNLKRRLYKVNRFESEGLIILLTHHLSTTTERGCSIGKIENYQNLPTAIRCGIKTIKFLIMGKHRDFVIRNGNIEFKH

SEQ ID NO: 243 - protein, 1473 aa, Mucilaginibacter paludis
MKNILGLDLGTNSIGWALIEKDTDQKNGNILGTGSRIIPMSQDIKDEFGKGNSISQTADRTKFRSVRRLRERHLLRRERLHRVLNVLGFLPKHYADQIDFKKRLGKLVNETEPKLVYDNKNFIFKKSFEAMLSDFNQHQPLLLADGKKVPFDWTIYYLRKKALTEKIEKEELAWLILNFNQKRGYYQLRGEEEEENPNKMVAFHSLKIVEVIADESQKGKAETWYSLILENGWIYRRSSKTPLYDWKGKQRDFIVTTDLNDDGSIKTDKEGLEKRSFRAPVEDDWTLVKKKTEQEINRSHKTVGTYIYENLLQDPKQKIKGKLVRTIEREFYKDELKMILKNQQKFHPELNDEHLYINCVRELYRNNQAHQTILSKKDFVHLFIDDIIFYQRPLRSQKSSISNCTLEFRKYKNENGTDQTDYLKAIPKSHPLFQEFRLWQWIYNLGIYQKEDDTNVTDELIKNIDGYQDLFDFLNNKKEIRQDILIKFLVEQTGLKGKPLSSVVAKYRWNFVEDKIYPCNETGTQIRTRLAKVENTPEDFLTAETEIKLWHIIYSVNDKADYEKALKTFAEKHNLDTHSFVENFKKFPPFKSEYGSFSEKAIKKLLPLIRLGKYWSWENIDKKTQERIEKILTGEFDEAIKSRVRDKAIHLTEEDHFQGLQLWLASYVVYGRHSEADNLDKWHTVADLEDYLAEFRQHSLRNPIVEQVITETLRVVKDIWLQYGQGAKDFFSEIHIELAREMKNTGDERKRLTSLVTDNENTNLRIKVLLSELLNDGNVENVRPYSPMQQEALKIFEDGVLNSDIEIEDDILKISKMAQPTNTELKRYKLWLEQKYRSPYTGQIIPLNRLFTADYEIEHIIPQSRFFDDSFSNKIICESAVNQLKDKQLGLEFIKNHSGTIVKLGMGKTAKILDVESYNEFVKGNYTKNISKRNKLMLEEIPDKMIERQLNDTRYISKFIISALSNIVRSESNDDGFNSKNVLPGNGKITSRLKQDWGMNDIWNELILPRFERMNKITDSAVFTAWNENNQKFLPIVPLEFSKGFQKKRIDHRHHALDALVIAASTREHINLLNNEHAKSDKRFDLNRKLRKFEKVAYNDPKTGKRIEKEVPTIFLKPWETFTVDAKNSLESIIVSFKQNLRVINRATNYSESYNDENGALRLGKDGNPLKEKIKQSKGDSWAIRKPMHKDFVYGKVHLQNVKLPKDKFITAIRKSLDVTFDLKRIETITDTGIQKILKNYLHSKENKVELAFSPEGIEDMNQHIERYNDGKKHQPIHKVRVFEIGSRFSLGESGNKKTKFVEAAKGTNLFFAVYQDDNKGKRNYETIPLNIVIERQKLGLHSVPTEDAKGGKLLFHLSPNDMVYVPTSEELEDNLASVNIKRLNTAQRKRIYKVEKASGVECYFIRQDIAYLIKNYDAKTKIGELESQNKLQTTMTDDRLKITDVCVKLNIDRLGSIAETFLGNQYGASKKT

SEQ ID NO: 244 - protein, 1365 aa, Filifactor alocis
MTKEYYLGLDVGTNSVGWAVTDSQYNLCKFKKKDMWGIRLFESANTAKDRRLQRGNRRRLERKKQRIDLLQEIFSPEICKIDPTFFIRLNESRLHLEDKSNDFKYPLFIEKDYSDIEYYKEFPTIFHLRKHLIESEEKQDIRLIYLALHNIIKTRGHFLIDGDLQSAKQLRPILDTFLLSLQEEQNLSVSLSENQKDEYEEILKNRSIAKSEKVKKLKNLFEISDELEKEEKKAQSAVIENFCKFIVGNKGDVCKFLRVSKEELEIDSFSFSEGKYEDDIVKNLEEKVPEKVYLFEQMKAMYDWNILVDILETEEYISFAKVKQYEKHKTNLRLLRDIILKYCTKDEYNRMFNDEKEAGSYTAYVGKLKKNNKKYWIEKKRNPEEFYKSLGKLLDKIEPLKEDLEVLTMMIEECKNHTLLPIQKNKDNGVIPHQVHEVELKKILENAKKYYSFLTETDKDGYSVVQKIESIFRFRIPYYVGPLSTRHQEKGSNVWMVRKPGREDRIYPWNMEEIIDFEKSNENFITRMTNKCTYLIGEDVLPKHSLLYSKYMVLNELNNVKVRGKKLPTSLKQKVFEDLFENKSKVTGKNLLEYLQIQDKDIQIDDLSGFDKDFKTSLKSYLDFKKQIFGEEIEKESIQNMIEDIIKWITIYGNDKEMLKRVIRANYSNQLTEEQMKKITGFQYSGWGNFSKMFLKGISGSDVSTGETFDIITAMWETDNNLMQILSKKFTFMDNVEDFNSGKVGKIDKITYDSTVKEMFLSPENKRAVWQTIQVAEEIKKVMGCEPKKIFIEMARGGEKVKKRTKSRKAQLLELYAACEEDCRELIKEIEDRDERDFNSMKLFLYYTQFGKCMYSGDDIDINELIRGNSKWDRDHIYPQSKIKDDSIDNLVLVNKTYNAKKSNELLSEDIQKKMHSFWLSLLNKKLITKSKYDRLTRKGDFTDEELSGFIARQLVETRQSTKAIADIFKQIYSSEVVYVKSSLVSDFRKKPLNYLKSRRVNDYHHAKDAYLNIVVGNVYNKKFTSNPIQWMKKNRDTNYSLNKVFEHDVVINGEVIWEKCTYHEDTNTYDGGTLDRIRKIVERDNILYTEYAYCEKGELFNATIQNKNGNSTVSLKKGLDVKKYGGYFSANTSYFSLIEFEDKKGDRARHIIGVPIYIANMLEHSPSAFLEYCEQKGYQNVRILVEKIKKNSLLIINGYPLRIRGENEVDTSFKRAIQLKLDQKNYELVRNIEKFLEKYVEKKGNYPIDENRDHITHEKMNQLYEVLLSKMKKFNKKGMADPSDRIEKSKPKFIKLEDLIDKINVINKMLNLLRCDNDTKADLSLIELPKNAGSFVVKKNTIGKSKIILVNQSVTGLYENRREL

SEQ ID NO: 245 - protein, 1130 aa, Streptococcus macedonicus
MTNGKILGLDIGIASVGVGIIEAKTGKVVHANSRLFSAANAENNAERRGFRGSRRLNRRKKHRVKRVRDLFEKYGIVTDFRNLNLNPYELRVKGLTEQLTNEELFAALRTISKRRGISYLDDAEDDSTGSTDYAKSIDENRRLLKTKTPGQIQLERLEKYGQLRGNFTVYDENGEAHRLINVFSTSDYEKEARKILETQADYNKKITAEFIDDYVEILTQKRKYYHGPGNEKSRTDYGRFRTDGTTLENIFGILIGKCNFYPDEYRASKASYTAQEYNFLNDLNNLKVPTETGKLSTEQKESLVEFAKNTAILGPAKLLKEIAKILDCKVDEIKGYREDDKGKPDLHTFEPYRKLKFNLDSVNIDYLSREVLDKLADILTLNTEREGIEDAIKRNLPNQFTEEQISEIINVRKSQSTAFNKGWHSFSAKLMNELIPELYATSDEQMTILTRLEKFKVKKKSSKNIKTIDEKEITDEIYNPVVAKSVRQTIKIINAAVKKYGDFDKIVIEMPRDKNADDEKKFINKRNKENKKEKDDALKRAAYLYNGTDKLPDEVFHGNKQLETKIRLWYQQGERCLYSGKPIPIQELVHNSNNFEIDHILPLSLSFDDSLANKVLVYSWTNQEKGQKTPYQVIDSMDAAWSFREMKEYVLKQKGLGKKKRDYLLTTENIDKIEVKKKFIERNLVDTRYASRVVLNSLQSALRELGKDTKVSVVRGQFTSQLRRKWKIDKSRETYHHHAVDALIIAASSQLKLWEKQDNPMFVDYGNNQVVDKQTGEILSVSDNEYKELVFQPPYQGFVNTISSKGFEDEILFSYQVDSKYNRKVSDATIYSTRKAKIGKDKKEETYVLGKIKDIYSQNGFDTFVKKYNKDKTQFLMYQKDPLTWENVIEVILGDYPTTKKSEDGKNDVKCNPFEEYRRENGLICKYSKKGKGTPIKSLKYYDKKLGNCIDITPEESRNKVILQSINPWRADVYFNPETLKYELMGLKYSDLSFEKGTGNYHISQEKYDAIKEKEGIGKKSEFKFTLYRNDLILIKDIASGEQEIYRFLSRTMPNVNHYVELKPYDKEKFDNVQELVEALGEADKVGRCIKSLNKPNISIYKVRTDVLGNKYFVKKEGDKPKLDFKNNKK

SEQ ID NO: 246 - protein, 1367 aa, Streptococcus pyogenes
MDKKYSIGLDIGTNSVGWAVITDDYKVPSKKFKVLGNTDRHSIKKNLIGALLFGSGETAEATRLKRTARRRYTRRKNRICYLQEIFSNEMAKVDDSFFHRLEESFLVEEDKKHERHPIFGNIVDEVAYHEKYPTIYHLRKKLADSTDKADLRLIYLALAHMIKFRGHFLIEGDLNPDNSDVDKLFIQLVQIYNQLFEENPINASRVDAKAILSARLSKSRRLENLIAQLPGEKRNGLFGNLIALSLGLTPNFKSNFDLAEDAKLQLSKDTYDDDLDNLLAQIGDQYADLFLAAKNLSDAILLSDILRVNSEITKAPLSASMIKRYDEHHQDLTLLKALVRQQLPEKYKEIFFDQSKNGYAGYIDGGASQEEFYKFIKPILEKMDGTEELLVKLNREDLLRKQRTFDNGSIPHQIHLGELHAILRRQEDFYPFLKDNREKIEKILTFRIPYYVGPLARGNSRFAWMTRKSEETITPWNFEEVVDKGASAQSFIERMTNFDKNLPNEKVLPKHSLLYEYFTVYNELTKVKYVTEGMRKPAFLSGEQKKAIVDLLFKTNRKVTVKQLKEDYFKKIECFDSVEISGVEDRFNASLGAYHDLLKIIKDKDFLDNEENEDILEDIVLTLTLFEDRGMIEERLKTYAHLFDDKVMKQLKRRRYTGWGRLSRKLINGIRDKQSGKTILDFLKSDGFANRNFMQLIHDDSLTFKEDIQKAQVSGQGHSLHEQIANLAGSPAIKKGILQTVKIVDELVKVMGHKPENIVIEMARENQTTQKGQKNSRERMKRIEEGIKELGSQILKEHPVENTQLQNEKLYLYYLQNGRDMYVDQELDINRLSDYDVDHIVPQSFIKDDSIDNKVLTRSDKNRGKSDNVPSEEVVKKMKNYWRQLLNAKLITQRKFDNLTKAERGGLSELDKAGFIKRQLVETRQITKHVAQILDSRMNTKYDENDKLIREVKVITLKSKLVSDFRKDFQFYKVREINNYHHAHDAYLNAVVGTALIKKYPKLESEFVYGDYKVYDVRKMIAKSEQEIGKATAKYFFYSNIMNFFKTEITLANGEIRKRPLIETNGETGEIVWDKGRDFATVRKVLSMPQVNIVKKTEVQTGGFSKESILPKRNSDKLIARKKDWDPKKYGGFDSPTVAYSVLVVAKVEKGKSKKLKSVKELLGITIMERSSFEKNPIDFLEAKGYKEVKKDLIIKLPKYSLFELENGRKRMLASAGELQKGNELALPSKYVNFLYLASHYEKLKGSPEDNEQKQLFVEQHKHYLDEIIEQISEFSKRVILADANLDKVLSAYNKHRDKPIREQAENIIHLFTLTNLGAPAAFKYFDTTIDRKRYTSTKEVLDATLIHQSITGLYETRIDLSQLGGD

SEQ ID NO: 247 - protein, 1233 aa, Mycoplasma canis
MEKKRKVTLGFDLGIASVGWAIVDSETNQVYKLGSRLFDAPDTNLERRTQRGTRRLLRRRKYRNQKFYNLVKRTEVFGLSSREAIENRFRELSIKYPNIIELKTKALSQEVCPDEIAWILHDYLKNRGYFYDEKETKEDFDQQTVESMPSYKLNEFYKKYGYFKGALSQPTESEMKDNKDLKEAFFFDFSNKEWLKEINYFFNVQKNILSETFIEEFKKIFSFTRDISKGPGSDNMPSPYGIFGEFGDNGQGGRYEHIWDKNIGKCSIFTNEQRAPKYLPSALIFNFLNELANIRLYSTDKKNIQPLWKLSSVDKLNILLNLFNLPISEKKKKLTSTNINDIVKKESIKSIMISVEDIDMIKDEWAGKEPNVYGVGLSGLNIEESAKENKFKFQDLKILNVLINLLDNVGIKFEFKDRNDIIKNLELLDNLYLFLIYQKESNNKDSSIDLFIAKNESLNIENLKLKLKEFLLGAGNEFENHNSKTHSLSKKAIDEILPKLLDNNEGWNLEAIKNYDEEIKSQIEDNSSLMAKQDKKYLNDNFLKDAILPPNVKVTFQQAILIFNKIIQKFSKDFEIDKVVIELAREMTQDQENDALKGIAKAQKSKKSLVEERLEANNIDKSVFNDKYEKLIYKIFLWISQDFKDPYTGAQISVNEIVNNKVEIDHIIPYSLCFDDSSANKVLVHKQSNQEKSNSLPYEYIKQGHSGWNWDEFTKYVKRVFVNNVDSILSKKERLKKSENLLTASYDGYDKLGFLARNLNDTRYATILFRDQLNNYAEHHLIDNKKMFKVIAMNGAVTSFIRKNMSYDNKLRLKDRSDFSHHAYDAAIIALFSNKTKTLYNLIDPSLNGIISKRSEGYWVIEDRYTGEIKELKKEDWTSIKNNVQARKIAKEIEEYLIDLDDEVFFSRKTKRKTNRQLYNETIYGIATKTDEDGITNYYKKEKFSILDDKDIYLRLLREREKFVINQSNPEVIDQIIEIIESYGKENNIPSRDEAINIKYTKNKINYNLYLKQYMRSLTKSLDQFSEEFINQMIANKTFVLYNPTKNTTRKIKFLRLVNDVKINDIRKNQVINKFNGKNNEPKAFYENINSLGAIVFKNSANNFKTLSINTQIAIFGDKNWDIEDFKTYNMEKIEKYKEIYGIDKTYNFHSFIFPGTILLDKQNKEFYYISSIQTVRDIIEIKFLNKIEFKDENKNQDTSKTPKRLMFGIKSIMNNYEQVDISPFGINKKIFE

SEQ ID NO: 248 - protein, 1375 aa, Lactobacillus johnsonii
MTKIKDDYIVGLDIGTDSCGWVAMNSNNDILKLQGKTAIGSRLFEGGKSAAERRLFRTTHRRIKRRRWRLKLLEEFFDPYMAEVDPYFFARLKESGLSPLDKRKTVSSIVFPTSAEDKKFYDDYPTIYHLRYKLMTEDEKFDLREVYLAIHHIIKYRGNFLYNTSVKDFKASKIDVKSSIEKLNELYENLGLDLNVEFNISNTAEIEKVLKDKQIFKRDKVKKIAELFAIKTDNKEQSKRIKDISKQVANAVLGYKTRFDTIALKEISKDELSDWNFKLSDIDADSKFEALMGNLDENEQAILLTIKELFNEVTLNGIVEDGNTLSESMINKYNDHRDDLKLLKEVIENHIDRKKAKELALAYDLYVNNRHGQLLQAKKKLGKIKPRSKEDFYKVVNKNLDDSRASKEIKKKIELDSFMPKQRTNANGVIPYQLQQLELDKIIENQSKYYPFLKEINPVSSHLKEAPYKLDELIRFRVPYYVGPLISPNESTKDIQTKKNQNFAWMIRKEEGRITPWNFDQKVDRIESANKFIKRMTTKDTYLFGEDVLPANSLLYQKFTVLNELNNIRINGKRISVDLKQEIYENLFKKHTTVTVKKLENYLKENHNLVKVEIKGLADEKKFNSGLTTYNRFKNLNIFDNQIDDLKYRNDFEKIIEWSTIFEDKSIYKEKLRSIDWLNEKQINALSNIRLQGWGRLSKKLLAQLHDHNGQTIIEQLWDSQNNFMQIVTQADFKDAIAKANQNLLVATSVEDILNNAYTSPANKKAIRQVIKVVDDIVKAASGKVPKQIAIEFTRDADENPKRSQTRGSKLQKVYKDLSTELASKTIAEELNEAIKDKKLVQDKYYLYFMQLGRDAYTGEPINIDEIQKYDIDHILPQSFIKDDALDNRVLVSRAVNNGKSDNVPVKLFGNEMAANLGMTIRKMWEEWKNIGLISKTKYNNLLTDPDHINKYKSAGFIRRQLVETSQIIKLVSTILQSRYPNTEIITVKAKYNHYLREKFDLYKSREVNDYHHAIDAYLSAICGNLLYQNYPNLRPFFVYGQYKKFSSDPDKEKAIFNKTRKFSFISQLLKNKSENSKEIAKKLKRAYQFKYMLVSRETETRDQEMFKMTVYPRFSHDTVKAPRNLIPKKMGMSPDIYGGYTNNSDAYMVIVRIDKKKGTEYKILGIPTRELVNLKKAEKEDHYKSYLKEILTPRILYNKNGKRDKKITSFEIVKSKIPYKQVIQDGDKKFMLGSSTYVYNAKQLTLSTESMKAITNNFDKDSDENDALIKAYDEILDKVDKYLPLFDINKFREKLHSGREKFIKLSLEDKKDTILKVLEGLHDNAVMTKIPTIGLSTPLGFMQFPNGVILSENAKLIYQSPTGLFKKSVKISDL

SEQ ID NO: 249 - protein, 1053 aa, Staphylococcus aureus
MKRNYILGLDIGITSVGYGIIDYETRDVIDAGVRLFKEANVENNEGRRSKRGARRLKRRRRHRIQRVKKLLFDYNLLTDHSELSGINPYEARVKGLSQKLSEEEFSAALLHLAKRRGVHNVNEVEEDTGNELSTKEQISRNSKALEEKYVAELQLERLKKDGEVRGSINRFKTSDYVKEAKQLLKVQKAYHQLDQSFIDTYIDLLETRRTYYEGPGEGSPFGWKDIKEWYEMLMGHCTYFPEELRSVKYAYNADLYNALNDLNNLVITRDENEKLEYYEKFQIIENVFKQKKKPTLKQIAKEILVNEEDIKGYRVTSTGKPEFTNLKVYHDIKDITARKEIIENAELLDQIAKILTIYQSSEDIQEELTNLNSELTQEEIEQISNLKGYTGTHNLSLKAINLILDELWHTNDNQIAIFNRLKLVPKKVDLSQQKEIPTTLVDDFILSPVVKRSFIQSIKVINAIIKKYGLPNDIIIELAREKNSKDAQKMINEMQKRNRQTNERIEEIIRTTGKENAKYLIEKIKLHDMQEGKCLYSLEAIPLEDLLNNPFNYEVDHIIPRSVSFDNSFNNKVLVKQEENSKKGNRTPFQYLSSSDSKISYETFKKHILNLAKGKGRISKTKKEYLLEERDINRFSVQKDFINRNLVDTRYATRGLMNLLRSYFRVNNLDVKVKSINGGFTSFLRRKWKFKKERNKGYKHHAEDALIIANADFIFKEWKKLDKAKKVMENQMFEEKQAESMPEIETEQEYKEIFITPHQIKHIKDFKDYKYSHRVDKKPNRELINDTLYSTRKDDKGNTLIVNNLNGLYDKDNDKLKKLINKSPEKLLMYHHDPQTYQKLKLIMEQYGDEKNPLYKYYEETGNYLTKYSKKDNGPVIKKIKYYGNKLNAHLDITDDYPNSRNKVVKLSLKPYRFDVYLDNGVYKFVTVKNLDVIKKENYYEVNSKCYEEAKKLKKISNQAEFIASFYNNDLIKINGELYRVIGVNNDLLNRIEVNMIDITYREYLENMNDKRPPRIIKTIASKTQSIKKYSTDILGNLYEVKSKKHPQIIKKG

SEQ ID NO: 250 - protein, 1063 aa, Simonsiella muelleri
MEKFHYVLGLDLGIASVGWAAIEIDKETETSIGLLDCGVRTFERAEVPKTGDSLAKARREARSTRRLIRRRSHRLLRLKRLLKREIFRQPETFKDLPINAWQLRVKGLDSRLNEYEWAAVLLHLVKHRGYLSQRKSEMSETDSKSEMGRLLAGVAENHQLLQQEQYRTPAELALKKFVKHFRNKGGDYAHTFNRLDLQAELHLLFQKQRELGNPFTSPELERQVDDLLMTQRSALQGDAILKMLGHCGFEPEQFKAAKNTFSAERFIWLTKLNNLRIQDQGKERALTADERTKLLDEPYKKSKLTYAQVRKLLSLPQTAIFKGLRYDLEHDKKAENSTLMEMKSYHNIRQTLEKSGLKTEWQSIATQPEILDAIGTAFSIYKTDEDISHELKTCRLPENVLNELLKNINFDGFIQLSLTALRKILPLMEQGYRYDEACTQIYGNHHSGSLQQESKQFLPHIPIDDVRNPVVFRTLTQARKVVNAIIRRYGSPARVHIEMARELGKSKSDRDRIEKQQQKNKKERENAVAKFKEDFPDFVGEPRGKDILKMRLYEQQHGKCLYSGHDIDINRLNEKGYVEIDHALPFSRTWDDSQNNKVLVLGSENQNKRNQTPDEYLDGANNSQRWLEFQARVQTCHFSYGKKQRIQLAKLDDETEKGFLERNLNDTRYIARFMCQFVQENLYLTGKGKRLVFASNGGMTATLRNLWGLRKVREDNDRHHALDAIVVACSTASMQQKITKAFQRHESIEYVDTETGEVKFRIPQPWDFFRQEVMIRVFSDQPCEDLVEKLSARPEALHDNVTPLFVSRAPNRKMSGQGHLETIKSAKRLSEENSMVKKPLTTLKLKDIPEIVGYPSREPQLYAALKTRLETHDDDPIKAFAKPFYKPNKNGELGALVRSVRVKGVQNTGVMVHDGKGIADNATMVRVDVYTKAGKNYLVPVYVWQVAQGILPNRAVTSGKSEADWDLIDESFEFKFSLSRGDLVEMISNKGRIFGYYNGLDRANGSIGIREHDLEKSKGKDGVHRVGVKTATAFNKYHVDPLGKEIHRCSSEPRPTLKIKSKK

SEQ ID NO: 251 - protein, 1509 aa, Psychroflexus torquis
MKRILGLDLGTNSIGWSLIEHDFKNKQGQIEGLGVRIIPMSQEILGKFDAGQSISQTADRTKYRGVRRLYQRDNLRRERLHRVLKILDFLPKHYSESIDFQDKVGQFKPKQEVKLNYRKNEKNKHEFVFMNSFIEMVSEFKNAQPELFYNKGNGEETKIPYDWTLYYLRKKALTQQITKEELAWLILNFNQKRGYYQLRGEDIDEDKNKKYMQLKVNNLIDSGAKVKGKVLYNVIFDNGWKYEKQIVNKDEWEGRTKEFIITTKTLKNGNIKRTYKAVDSEIDWAAIKAKTEQDINKANKTVGEYIYESLLDNPSQKIRGKLVKTIERKFYKEEFEKLLSKQIELQPELFNESLYKACIKELYPRNENHQSNNKKQGFEYLFTEDIIFYQRPLKSQKSNISGCQFEHKIYKQKNKKTGKLELIKEPIKTISRSHPLFQEFRIWQWLQNLKIYNKEKIENGKLEDVTTQLLPNNEAYVTLFDFLNTKKELEQKQFIEYFVKKKLIDKKEKEHFRWNFVEDKKYPFSETRAQFLSRLAKVKGIKNTEDFLNKNTQVGSKENSPFIKRIEQLWHIIYSVSDLKEYEKALEKFAEKHNLEKDSFLKNFKKFPPFVSDYASYSKKAISKLLPIMRMGKYWSESAVPTQVKERSLSIMERVKVLPLKEGYSDKDLADLLSRVSDDDIPKQLIKSFISFKDKNPLKGLNTYQANYLVYGRHSETGDIQHWKTPEDIDRYLNNFKQHSLRNPIVEQVVMETLRVVRDIWEHYGNNEKDFFKEIHVELGREMKSPAGKREKLSQRNTENENTNHRIREVLKELMNDASVEGGVRDYSPSQQEILKLYEEGIYQNPNTNYLKVDEDEILKIRKKNNPTQKEIQRYKLWLEQGYISPYTGKIIPLTKLFTHEYQIEHIIPQSRYYDNSLGNKIICESEVNEDKDNKTAYEYLKVEKGSIVFGHKLLNLDEYEAHVNKYFKKNKTKLKNLLSEDIPEGFINRQLNDSRYISKLVKGLLSNIVRENGEQEATSKNLIPVTGVVTSKLKQDWGLNDKWNEIIAPRFKRLNKLTNSNDFGFWDNDINAFRIQVPDSLIKGFSKKRIDHRHHALDALVVACTSRNHTHYLSALNAENKNYSLRDKLVIKNENGDYTKTFQIPWQGFTIEAKNNLEKTVVSFKKNLRVINKTNNKFWSYKDENGNLNLGKDGKPKKKLRKQTKGYNWAIRKPLHKETVSGIYNINAPKNKIATSVRTLLTEIKNEKHLAKITDLRIRETILPNHLKHYLNNKGEANFSEAFSQGGIEDLNKKITTLNEGKKHQPIYRVKIFEVGSKFSISEDENSAKSKKYVEAAKGTNLFFAIYLDEENKKRNYETIPLNEVITHQKQVAGFPKSERLSVQPDSQKGTFLFTLSPNDLVYVPNNEELENRDLFNLGNLNVEQISRIYKFTDSSDKTCNFIPFQVSKLIFNLKKKEQKKLDVDFIIQNEFGLGSPQSKNQKSIDDVMIKEKCIKLKIDRLGNISKA

SEQ ID NO: 252 - protein, 1112 aa, Staphylococcus simulans
MLVGLKFKQSILFENMENAEDIKESATGSDAISLSDDYYENLSEFLTDEQLNFIESANTFFMGIMLDRILKGATSISAAKVRDYKIFKSQLKLIKDIVYQNKYDKYHEFFVTSKEDMRAYQENPDAKNFGKLSKFDQYLIHSKDQYAKLMKDLKGLVPKEYTEVLNLIDEQKFLVVQNTTDNASIPYQNNVFEAENILRNQQKYYPEITEEMIGKVINLISFRIPYYVGPLTNKNGQSDFAWMIRKSDEQTLPWNFDKVIDKSKSAEKFIRRMTSKCTYLLEEDVLPKHSLLYQEMEVLNELNNVQLRGENEPKHRIHRLDPKVKQFIYHNLFQKKKNVTHKDLITLLQNSEHRNTLNKTSGQKLKVFGTQNDSKFASKLSTYNDMKAILGSVENKRQMIEELVLWITIFEDKAILKQKIGEKYPNITEKQLNQIVKLNYSGWGRLSEKLLTKEVNGRSLIDLMYSTENNFMEIITDKTLGFDCFIKNSNKVKNAKISYKDVAELRTSPALKKGIWNAIKMVREISNLFGAPEKIIIEFATEDQAKGKRQKSRSELWDDLVKKNNLKRNKEFEGLFEELKAYPDLDFSNPKLWLYIHQNGKCMYTKKPIDLERLMSDTNNQLYEIDHILPRTFVKDDSINNKVLVIQSANQKKSGDKMPLEIFDNHVLVPFWKMLYENDLISSSKLSKLMKKEFNDLDKEGFIQRQLVETRQIISHVSDFLTEEYPSTTVVPMKANVVSELRRKFDIPKIRQLNDWHHAVDAYLNGFVYQAARVFYPKVNLFEFNFKWEKVREKWRQLGEFTENNKKREFFLFKRMENYVNEYGEGMISKLIFDLDNFKFNYSRKVESTESAFYKQSAFSPKNTTAQYDSDKNKTAIYKEMKNKRGIVVSYTYVKKDQELIGYGVFNETVFEYVNNADVDMNTRALKIVRKAFPKLDIKKAQYLFSINKGDALLVNGHPFLFVSAYERINGKQLEFDIAMQRKIKQALSPYNNMTEQEKVEFYNQFAEKVIEEFRNSIGLQSRDRKVNLIKNLFNNTEKSNDSMTQSILEVLKMTKVSAERSKELKIRWNGQTPNTFIDTKNNAEIQYKSITGLKTTKPKSIFKLAESKNEL

SEQ ID NO: 253 - protein, 1274 aa, Mycoplasma gallisept
MNINMNNSIKSKPEVTIGLDLGVGSVGWAIVDNETNIIHHLGSRLFSQAKTAEDRRSFRGVRRLIRRRKYKLKRFVNLIWKYNSYFGFKNKEDILNNYQEQQKLHNTVLNLKLEALNAKIDPKALSWILHDYLKNRGHFYEDNRDFNVYPTEELANYFDEFGYYKGIIDSKNDDDDKLEEGLTKYKFSNQHWLEEVKKVLSNQTGLPEKFKEEYESLFSYVRNYSEGPGSINSVSPYGIYHLDEKEGKVVQKYNNIWDKTIGKCSIFPDEYRAPKNSPIAMIFNEINELSTIRSYSIYLTGWFINQEFKKAYLNKLLDLLIKTNSEKPIDARQFKKLREETIAESIGKETLKDVESEEKLEKDDHKWKLKGLKLNTNGKIQYNDLSSLAKFVHKLKQHLKLDFLLEDQYTPLDKINFLQSLYVYLGKHLRYSNRVDSANLKEFSDSSRLFERVLQEQKDGLFKLFEQTDKDDEKILTQTHSLSTKAMLLAITRMTNLDNDEDNQKNNDKGWNFEAIKNFDQKFIDITKTNNNLSLKQDKRYLDDQFINDAILSPGVKRILREATKVFNAILKQFSEEYDVTKVVIELARELSEEKELENTKNYKKLIKKNGDKISEGLKALGIAEDKIEEILKSPTKSYKVLLWLQQDHIDPYSQKEIAFDDILTKTEKTEIDHIIPYSISFDDSSSNKLLVLAESNQAKSNQTPYEFINSGKAEITWEVYEAYCHKFKNGDSSLLDSTQRSKKFAKMMKTDTSSKYDIGFLARNLNDTRYATIVFRDALKDYANNHLVEDKPMFKVVCINGGVTSFLRKNFDPKSWYAKKDRDKNIHHAVDASIISIFSNETKTLFNQLTKFADYKLFKNTDGSWKKIDPKTGVVSEVTDENWKQIRVRNQVSEIAKVIDKYIQDSNIERKARYSRKIENKTNISLFNDTVYSAKKVGYEDQIKRKNLKTLDIHESAEENKNSKVKKQFVYRKLVNVSLLNNDKLADLFAEKEDILMYRANPWVINLAEQIFNEYTENKKIKSQNVFEKYMLDLTKEFPEKFSEAFVKSMIRNKTAIIYNVEKDVVHRIKRLKILSSELKENKWSNVIIRSKNESGTKLSYQDTINSIALMIMRSIDPTAKKQYIRVPLNTLNLHLGDQDFDLHNIDAYLKKPKFVKYLKANEIGDEYKPWRVLTSGTLLIHKKDKKLMYISSFQNLNDLIEIKNLIETEYKENVDSDPKKKKKASQILRSLSVILNDYILLDAKYNFDILGLSKNKIDEILNSKLDLDKIAK

SEQ ID NO: 254 - protein, 1122 aa, Artificial Sequence; identical to SEQ ID NO: 23
  Synthetic Sequence

SEQ ID NO: 255 - protein, 1236 aa, Artificial Sequence; identical to SEQ ID NO: 21
  Synthetic Sequence

SEQ ID NO: 256 - protein, 1059 aa, Artificial Sequence; identical to SEQ ID NO: 15
  Synthetic Sequence

SEQ ID NO: 257 - protein, 1166 aa, Artificial Sequence; identical to SEQ ID NO: 39
  Synthetic Sequence

SEQ ID NO: 258 - protein, 1149 aa, Artificial Sequence; identical to SEQ ID NO: 37
  Synthetic Sequence

SEQ ID NO: 259 - protein, 1314 aa, Artificial Sequence; identical to SEQ ID NO: 27
  Synthetic Sequence

SEQ ID NO: 260 - protein, 1064 aa, Artificial Sequence; identical to SEQ ID NO: 38
  Synthetic Sequence

SEQ ID NO: 261 - protein, 1401 aa, Artificial Sequence
  Synthetic Sequence
MDKKYSIGLDIGTNSVGWAVITDEYKVPSKKFKVLGNTDRHSIKKNLIGALLFDSGETAEATRLKRTARRRYTRRKNRICYLQEIFSNEMAKVDDSFFHRLEESFLVEEDKKHERHPIFGNIVDEVAYHEKYPTIYHLRKKLVDSTDKADLRLIYLALAHMIKFRGHFLIEGDLNPDNSDVDKLFIQLVQTYNQLFEENPINASGVDAKAILSARLSKSRRLENLIAQLPGEKKNGLFGNLIALSLGLTPNFKSNFDLAEDAKLQLSKDTYDDDLDNLLAQIGDQYADLFLAAKNLSDAILLSDILRVNTEITKAPLSASMIKRYDEHHQDLTLLKALVRQQLPEKYKEIFFDQSKNGYAGYIDGGASQEEFYKFIKPILEKMDGTEELLVKLNREDLLRKQRTFDNGSIPHQIHLGELHAILRRQEDFYPFLKDNREKIEKILTFRIPYYVGPLARGNSRFAWMTRKSEETITPWNFEEVVDKGASAQSFIERMTNFDKNLPNEKVLPKHSLLYEYFTVYNELTKVKYVTEGMRKPAFLSGEQKKAIVDLLFKTNRKVTVKQLKEDYFKKIECFDSVEISGVEDRFNASLGTYHDLLKIIKDKDFLDNEENEDILEDIVLTLTLFEDREMIEERLKTYAHLFDDKVMKQLKRRRYTGWGRLSRKLINGIRDKQSGKTILDFLKSDGFANRNFMQLIHDDSLTFKEDIQKAQVSGQGDSLHEHIANLAGSPAIKKGILQTVKVVDELVKVMGRHKPENIVIEMARENQTTQKGQKNSRERMKRIEEGIKELGSQILKEHPVENTQLQNEKLYLYYLQNGRDMYVDQELDINRLSDYDVDHIVPQSFLKDDSIDNKVLTRSDKNRGKSDNVPSEEVVKKMKNYWRQLLNAKLITQRKFDNLTKAERGGLSELDKAGFIKRQLVETRQITKHVAQILDSRMNTKYDENDKLIREVKVITLKSKLVSDFRKDFQFYKVREINNYHHAHDAYLNAVVGTALIKKYPKLESEFVYGDYKVYDVRKMIAKSEQEIGKATAKYFFYSNIMNFFKTEITLANGEIRKRPLIETNGETGEIVWDKGRDFATVRKVLSMPQVNIVKKTEVQTGGFSKESILPKRNSDKLIARKKDWDPKKYGGFDSPTVAYSVLVVAKVEKGKSKKLKSVKELLGITIMERSSFEKNPIDFLEAKGYKEVKKDLIIKLPKYSLFELENGRKRMLASAGELQKGNELALPSKYVNFLYLASHYEKLKGSPEDNEQKQLFVEQHKHYLDEIIEQISEFSKRVILADANLDKVLSAYNKHRDKPIREQAENIIHLFTLTNLGAPAAFKYFDTTIDRKRYTSTKEVLDATLIHQSITGLYETRIDLSQLGGDAYPYDVPDYASLGSGSPKKKRKVEDPKKKRKVD

SEQ ID NO: 262 - protein, 1368 aa, Artificial Sequence
  Synthetic Sequence
MDKKYSIGLAIGTNSVGWAVITDDYKVPSKKLKGLGNTDRHGIKKNLIGALLFDSGETAEATRLKRTARRRYTRRKNRICYLQEIFSNEMAKVDDSFFHRLEESFLVEEDKKHERHPIFGNIVDEVAYHEKYPTIYHLRKKLADSTDKVDLRLIYLALAHMIKFRGHFLIEGDLNPDNSDVDKLFIQLVQTYNQLFEENPINASRVDAKAILSARLSKSRRLENLIAQLPGEKKNGLFGNLIALSLGLTPNFKSNFDLAEDAKLQLSKDTYDDDLDNLLAQIGDQYADLFLAAKNLSDATLLSDILRVNSEITKAPLSASMIKRYDEHHQDLTLLKALVRQQLPEKYKEIFFDQSKNGYAGYIDGGASQEEFYKFIKPILEKMDGTEELLAKLNREDLLRKQRTFDNGSIPYQIHLGELHAILRRQEDFYPFLKDNREKIEKILTFRIPYYVGPLARGNSRFAWMTRKSEETITPWNFEEVVDKGASAQSFIERMTNFDKNLPNEKVLPKHSLLYEYFTVYNELTKVKYVTEGMRKPAFLSGEQKKAIVDLLFKTNRKVTVKQLKEDYFKKIECFDSVEISGVEDRFNASLGTYHDLLKIIKDKDFLDNEENEDILEDIVLTLTLFEDREMIEERLKTYAHLFDDKVMKQLKRRRYTGWGRLSRKLINGIRDKQSGKTILDFLKSDGFANRNFMQLIHDDSLTFKEDIQKAQVSGQGDSLHEHIANLAGSPAIKKGILQTVKVVDELVKVMGRHKPENIVIEMARENQTTQKGQKNSRERMKRIEEGIKELGSDILKEYPVENTQLQNEKLYLYYLQNGRDMYVDQELDINRLSDYDVDHIVPQSFLKDDSIDNKVLTRSDKNRGKSDNVPSEEVVKKMKNYWRQLLNAKLITQRKFDNLTKAERGGLSELDKVGFIKRQLVETRQITKHVAQILDSRMNTKYDENDKLIREVRVITLKSKLVSDFRKDFQFYKVREINNYHHAHDAYLNAVVGTALIKKYPKLESEFVYGDYKVYDVRKMIAKSEQEIGKATAKYFFYSNIMNFFKTEITLANGEIRKRPLIETNGETGEIVWDKGRDFATVRKVLSMPQVNIVKKTEVQTGGFSKESILPKRNSDKLIARKKDWDPKKYGGFDSPTVAYSVLVVAKVEKGKSKKLKSVKELLGITIMERSSFEKDPIDFLEAKGYKEVRKDLIIKLPKYSLFELENGRKRMLASAGELQKGNELALPSKYVNFLYLASHYEKLKGSPEDNEQKQLFVEQHKHYLDEIIEQISEFSKRVILADANLDKVLSAYNKHRDKPIREQAENIIHLFTLTNLGAPAAFKYFDTTIDRKRYTSTKEVLDATLIHQSITGLYETRIDLSQLGGD

SEQ ID NO: 263 - protein, 1368 aa, Artificial Sequence
  Synthetic Sequence
MDKKYSIGLDIGTNSVGWAVITDDYKVPSKKLKGLGNTDRHGIKKNLIGALLFDSGETAEATRLKRTARRRYTRRKNRICYLQEIFSNEMAKVDDSFFHRLEESFLVEEDKKHERHPIFGNIVDEVAYHEKYPTIYHLRKKLADSTDKVDLRLIYLALAHMIKFRGHFLIEGDLNPDNSDVDKLFIQLVQTYNQLFEENPINASRVDAKAILSARLSKSRRLENLIAQLPGEKKNGLFGNLIALSLGLTPNFKSNFDLAEDAKLQLSKDTYDDDLDNLLAQIGDQYADLFLAAKNLSDATLLSDILRVNSEITKAPLSASMIKRYDEHHQDLTLLKALVRQQLPEKYKEIFFDQSKNGYAGYIDGGASQEEFYKFIKPILEKMDGTEELLAKLNREDLLRKQRTFDNGSIPYQIHLGELHAILRRQEDFYPFLKDNREKIEKILTFRIPYYVGPLARGNSRFAWMTRKSEETITPWNFEEVVDKGASAQSFIERMTNFDKNLPNEKVLPKHSLLYEYFTVYNELTKVKYVTEGMRKPAFLSGEQKKAIVDLLFKTNRKVTVKQLKEDYFKKIECFDSVEISGVEDRFNASLGTYHDLLKIIKDKDFLDNEENEDILEDIVLTLTLFEDREMIEERLKTYAHLFDDKVMKQLKRRRYTGWGRLSRKLINGIRDKQSGKTILDFLKSDGFANRNFMQLIHDDSLTFKEDIQKAQVSGQGDSLHEHIANLAGSPAIKKGILQTVKVVDELVKVMGRHKPENIVIEMARENQTTQKGQKNSRERMKRIEEGIKELGSDILKEYPVENTQLQNEKLYLYYLQNGRDMYVDQELDINRLSDYDVDAIVPQSFLKDDSIDNKVLTRSDKNRGKSDNVPSEEVVKKMKNYWRQLLNAKLITQRKFDNLTKAERGGLSELDKVGFIKRQLVETRQITKHVAQILDSRMNTKYDENDKLIREVRVITLKSKLVSDFRKDFQFYKVREINNYHHAHDAYLNAVVGTALIKKYPKLESEFVYGDYKVYDVRKMIAKSEQEIGKATAKYFFYSNIMNFFKTEITLANGEIRKRPLIETNGETGEIVWDKGRDFATVRKVLSMPQVNIVKKTEVQTGGFSKESILPKRNSDKLIARKKDWDPKKYGGFDSPTVAYSVLVVAKVEKGKSKKLKSVKELLGITIMERSSFEKDPIDFLEAKGYKEVRKDLIIKLPKYSLFELENGRKRMLASAGELQKGNELALPSKYVNFLYLASHYEKLKGSPEDNEQKQLFVEQHKHYLDEIIEQISEFSKRVILADANLDKVLSAYNKHRDKPIREQAENIIHLFTLTNLGAPAAFKYFDTTIDRKRYTSTKEVLDATLIHQSITGLYETRIDLSQLGGD

SEQ ID NO: 264 - protein, 1368 aa, Artificial Sequence
  Synthetic Sequence
MDKKYSIGLAIGTNSVGWAVITDDYKVPSKKLKGLGNTDRHGIKKNLIGALLFDSGETAEATRLKRTARRRYTRRKNRICYLQEIFSNEMAKVDDSFFHRLEESFLVEEDKKHERHPIFGNIVDEVAYHEKYPTIYHLRKKLADSTDKVDLRLIYLALAHMIKFRGHFLIEGDLNPDNSDVDKLFIQLVQTYNQLFEENPINASRVDAKAILSARLSKSRRLENLIAQLPGEKKNGLFGNLIALSLGLTPNFKSNFDLAEDAKLQLSKDTYDDDLDNLLAQIGDQYADLFLAAKNLSDATLLSDILRVNSEITKAPLSASMIKRYDEHHQDLTLLKALVRQQLPEKYKEIFFDQSKNGYAGYIDGGASQEEFYKFIKPILEKMDGTEELLAKLNREDLLRKQRTFDNGSIPYQIHLGELHAILRRQEDFYPFLKDNREKIEKILTFRIPYYVGPLARGNSRFAWMTRKSEETITPWNFEEVVDKGASAQSFIERMTNFDKNLPNEKVLPKHSLLYEYFTVYNELTKVKYVTEGMRKPAFLSGEQKKAIVDLLFKTNRKVTVKQLKEDYFKKIECFDSVEISGVEDRFNASLGTYHDLLKIIKDKDFLDNEENEDILEDIVLTLTLFEDREMIEERLKTYAHLFDDKVMKQLKRRRYTGWGRLSRKLINGIRDKQSGKTILDFLKSDGFANRNFMQLIHDDSLTFKEDIQKAQVSGQGDSLHEHIANLAGSPAIKKGILQTVKVVDELVKVMGRHKPENIVIEMARENQTTQKGQKNSRERMKRIEEGIKELGSDILKEYPVENTQLQNEKLYLYYLQNGRDMYVDQELDINRLSDYDVDAIVPQSFLKDDSIDNKVLTRSDKNRGKSDNVPSEEVVKKMKNYWRQLLNAKLITQRKFDNLTKAERGGLSELDKVGFIKRQLVETRQITKHVAQILDSRMNTKYDENDKLIREVRVITLKSKLVSDFRKDFQFYKVREINNYHHAHDAYLNAVVGTALIKKYPKLESEFVYGDYKVYDVRKMIAKSEQEIGKATAKYFFYSNIMNFFKTEITLANGEIRKRPLIETNGETGEIVWDKGRDFATVRKVLSMPQVNIVKKTEVQTGGFSKESILPKRNSDKLIARKKDWDPKKYGGFDSPTVAYSVLVVAKVEKGKSKKLKSVKELLGITIMERSSFEKDPIDFLEAKGYKEVRKDLIIKLPKYSLFELENGRKRMLASAGELQKGNELALPSKYVNFLYLASHYEKLKGSPEDNEQKQLFVEQHKHYLDEIIEQISEFSKRVILADANLDKVLSAYNKHRDKPIREQAENIIHLFTLTNLGAPAAFKYFDTTIDRKRYTSTKEVLDATLIHQSITGLYETRIDLSQLGGD

SEQ ID NO: 265 - protein, 240 aa, Acetobacter aceti
MANIAENLVFGIDLGIGSCGWAVLNQKAKDENIVALGSWCFDVPETDKERIPTNQIRRANRLLRRVIRRRRNRMAEIRRLFASKGMLDTADPDALAKISADPWEMRAKGLDYQLTPQEFAVALGHIAKRRGFKSAAKRVSTNAPSEDSKMLAALEKTKEQSAQYRTIGEMFARDPAYADRRRNRDGCFDRTMSREDLFKETQILFESQRRLGNFSATSETEQAFIDIAFRQKPMQDSERL

SEQ ID NO: 266 - protein, 400 aa, Acetobacter aceti
SFERFRLLCRLVNLRVTDGLEDRPLTPEELRLACEDAGKTRKLSVKKVRSLIGLRDDQRFTTIPPDQEQHDIAARTGDALTGTATFRAILGESFWRQLLPHPEQLDRAAWIISFHELTDTIISKLATIGLPSEVMELIRKALEDGKFSKFKGAASLSDKAARKLIPFLQEGLTYDKACQKAGYNHAASKFTHYDSIDTKAKFNSLMDDVRDSITNPVARKAISEGMKQVWAMRNQWGLPGAICIELARDVGNSAEKRREIESGIKKNTAQRERERQEAKEHLNQSDISSETLLRYRLWKEQGGRCCYTDQPITPSQLIASDNSVQVDHILPWSRFGDDSYLNKALCTAKANQEKKNRTPWEWIHNQKGVEAWNHFTAAVESRKETRGLKKRNFLLKSSKE

SEQ ID NO: 267 - protein, 376 aa, Acetobacter aceti
YAARVMAEAVRLLYPSGNRAEKGGVKRVFTRPGALTAALRHAWGVESLKKINGKRLNDDRHHALDAAVVAAVSEKEIQKLTKSFQICEQKGLARPMRDVPMPWEGFRHQLETAYADIRVARPERRRARGKGHDATIRQLREEKDGPVVYERRAISDLKLTDLERIKDPERNSAIISSLRTWIEKGKPADYPPQSPKGDEIRKIRVMSRNKPAVSVRGGTADRGEMTRVDVFTKMGKKGKPEWFLVPIYRHQVIDRIQWPQPPNQAAANGKSEKNWPTMGLEHEFRFSLYPRSYVQIVKRDGEIIEGYFAGLDRTVAAFSLLSSSDPTSIQRGIGAKTLESIRKYNVNRFGDISMVEQETRTWHGDVCISPDQPDSA

SEQ ID NO: 268 - protein, 1054 aa, Actinobacillus suis
MKLTPLNYILGLDLGIASVGWAVVEIDEQENPLGLIDVGVRTFDRAEVPKTGESLALARRLARSARRLVKRRADRIKKAKRLLKAENILLSADEHLPNDVWQLRVKGLDQKLERQEWAAVLLHLLKHRGYLSQRKNESKSENKELGALLSGVETNHQILQSAEYRTPAEIAVKKFHVEDGHIRNQRGAYTHTFSRLDLLAEMELLFQRQTDLGNPHTSAKLLENLTALLMWQKPALAGEAILKMLGKCTFEPTEYKAAKNSYSAERFVWLTKLNNLRILEQGAERALTDNERFALLDQPYEKAKFTYAQARTMLALPDEAIFKGVRYQGEDKKAVETKTILMEMKAYHQIRKALENADLKAEWNELKNNSELLDDIGTAFSLHKTDEDICRYLDGKLSESILNALLENLNFDKFIQLSLKALQQILPLMLQGQRYDEAVSAIYGDHYGKKSAEINRLLPTIPADEIRNPVVLRTLTQARKVINAVVRLYGSPARIHIETGREVGKSYQDRKKLEKQQEDNRKQRESAVKKFKEYFPNFVGEPKGKDILKMRLYELQQAKCLYSGKSLELHRLLEKGYVEVDHALPFSRTWDDSFNNKVLVLANENQNKGNLTPYEWLDGKNNSEHWQNFVARVQTSGFSHTKKQRILSHKLDEKGFIERNLNDTRYVARFLCNFIADNMLLTGKGKRKVFASNGQITALLRGRWGLQKVRDDNDRHHALDAVVVACSTVVMQQKITRFVRYEEGNVFSGERIDRETGEIIPLHFPSPWAFFRENVEIRIFSENPKLELENRLPDYPQYNHEFVQPLFVSRMPTRKMTGQGHMETVKSAKRLDEGLSVLKVPLTQLKLSDLERMVNREREVTLYESLKARLEQFGNDPAKAFAEPFHKKGGAVVKAVRVEQTQKSGVLVRDGNGVADNASMVRVDVFTKGGKYFLVPIYTWQVAKGILPNKAVTANVDEIDWLEMDESYQFIFTMYPNDLVKVKLKKEEFFGYYGGLDRATGAIVIKEHDLEKSKGKQGIYRIGVKLALSFEKYQVDELGKNIRPCRPTKRQHVR

SEQ ID NO: 269 - protein, 239 aa, Actinobacillus ureae
MEIRIFSENPKLGLENRLPGYPQYNHEFVQPLFVSRMPTRKMTGKGHMETVKSAKRLDEGLSVLKVPLTQLKLSDLERMVNREREDALYQSLKAHLEQFGNDPAKAFAEPFHKKGGTVVKAVRVEQTQKSGVLVRDGNGVADNTSMVRVDVFTKAGKYFLVPIYKWQVAKRILPNKAVTAGVDEIDWLEMDSSYQFIFTMYANDLVKVKLKKRSILGLLRWFRSCNWGYCYQRTRFREI

SEQ ID NO: 270 - protein, 400 aa, Actinobacillus ureae
MKLTPLNYILGLDLGIASVGWAVVEIDEQENPLGLIDVGVRTFDRAEVAKTGESLALARRLARSSRRLVKRRADRIKKAKRLLKAENLLLSADEILPNDVWQLRVKGLDQKLERQEWAAVLLHILKHRGYLSQRKNESKSENKELGALLSGVATNHQLLQTAEYRTPAEITVKKFQAEENGHGHIRNQRGDYSHTFDRKDLLAEMKLLFQRQAELGNPHTSEKLLENLTTLLLWQKPALAGEAILKMLGKCTFEPAEYKAAKNSYSAERFVWLTKLNNLRILENGIERALTDNERFTLLDQPYEKAKLTYAQARTMLALSDEAIFKGVRYQGEDKKAAEKVALIEMKGYQHIRKALEGAGLKAEWNELKNNSELLDDIGTAFSLYFSISNLPTEIAYFTP

SEQ ID NO: 271 - protein, 1113 aa, Actinomyces georgiae
MSASSQNVERIRYKVGIDVGLRSIGFCAVQVDADDRPVKLLNTVVHVHDAGVSPADAKKADTRKLVSGVARRTRRLYRTRKRRLVDLDRQLDGLGWPLVDPARFADPREPWFAREKLVSGRVDDADERKELLSVALRHIAHHRGWRNPYSTVESLQADAPPSEFLQGLNQRVSEKLGTELDPGLTQGQLVAKLLHRFPNAKIRGPEGILRGKLHQSDNAGELRLICRTQGLDCHITEELVRLVFQAKSPKANKEMRKRIGRDQLPGQGAHIRAEKAHPVFQRFRIVAVLANLRIREAHVDRRLTAEEMRTLTDFLLGLAGSEQPTWEELADNLNIERHQLRGTAKASVDGAPALRFPPIDATTDRIYASKLKWLAEWWRQADEERRGYMVDALSNSGGSEDEPYLDDEIAEMLEQASEEDQAKLDSLHLPGGRASYCLDTLRRLTDAMLGGGLDLFEARKAVFHVDDDWAPPTDPIGAPVGNPPVDRVLKHVARWLEAATGRWGAPQTINIEHVREGLGSEKAARELTRMNDRRRRNNQKLVEEMGEKLGMSGRIRRSDRMRYEAIRRQNCECLYCGQPITYQTMEMDHIVPRAGAASTNSRSNLAAVCRRCNHQKGKLPFAVWAESQDSPAEVRLQDAVQRVRHWLRDAGMGQKELQALRVQVIARLKSKRPDEEFDGRSMESIAWMANELRARVEAQYRGSGTTVRVYRGALTAEARKASGFEGRVNLIGGRGKDRFDRRHHAMDALVIALMNQSVAQTLALRLNMRDSQWLTQSEQTWRQFHGAPGEAARKWEAWDRDMRDASDLFNLALDGGRIPITENVRLRVGNGRVHEDGVIRFKPEYEVKGKTIKGGEARLLGDSLPSEQIDRAETPALWTALTRLPEYDRKSGLPENPDRVIRVNGAVVQATDRIRFFGTPASVAVRGGYAKLGESIHHARIYRINGKTPKYAMIRVYTIDLMRLNHEDIFTAVLKPSTISMRCAEKKLKYAIAEGNAEQIGWLVEGDQLELDAAAYAKGVGADLMREYPMATCWRVAGFPDEAKLRLRPVLLAAEGMGEDAPKFMREVLENQGWRPAVNALLSPGSVRVVRRNVLGEPRFKSSGHLPTTVDLV

SEQ ID NO: 272 - protein, 1101 aa, Actinomyces naeslundii
MWYASLMSAHHLRVGIDVGTHSVGLATLRVDDHGTPIELLSALSHIHDSGVGKEGKKDHDTRKKLSGIARRARRLLHHRRTQLQQLDEVLRDLGFPIPTPGEFLDLNEQTDPYRVWRVRARLVEEKLPEELRGPAISMAVRHIARHRGWRNPYSKVESLLSPAEESPFMKALRERILATTGEVLDDGITPGQAMAQVALTHNISMRGPEGILGKLHQSDNANEIRKICARQGVSPDVCKQLLRAVFKADSPRGSAVSRVAPDPLPGQGSFRRAPKCDPEFQRFRIISIVANLRISETKGENRPLTADERRHVVTFLTEDSQADLTWVDVAEKLGVHRRDLRGTAVHTDDGERSAARPPIDATDRIMRQTKISSLKTWWEEADSEQRGAMIRYLYEDPTDSECAEIIAELPEEDQAKLDSLHLPAGRAAYSRESLTALSDHMLATTDDLHEARKRLFGVDDSWAPPAEAINAPVGNPSVDRTLKIVGRYLSAVESMWGTPEVIHVEHVRDGFTSERMADERDKANRRRYNDNQEAMKKIQRDYGKEGYISRGDIVRLDALELQGCACLYCGTTIGYHTCQLDHIVPQAGPGSNNRRGNLVAVCERCNRSKSNTPFAVWAQKCGIPHVGVKEAIGRVRGWRKQTPNTSSEDLTRLKKEVIARLRRTQEDPEIDERSMESVAWMANELHHRIAAAYPETTVMVYRGSITAAARKAAGIDSRINLIGEKGRKDRIDRRHHAVDASVVALMEASVAKTLAERSSLRGEQRLTGKEQTWKQYTGSTVGAREHFEMWRGHMLHLTELFNERLAEDKVYVTQNIRLRLSDGNAHTVNPSKLVSHRLGDGLTVQQIDRACTPALWCALTREKDFDEKNGLPAREDRAIRVHGHEIKSSDYIQVFSKRKKTDSDRDETPFGAIAVRGGFVEIGPSIHHARIYRVEGKKPVYAMLRVFTHDLLSQRHGDLFSAVIPPQSISMRCAEPKLRKAITTGNATYLGWVVVGDELEINVDSFTKYAIGRFLEDFPNTTRWRICGYDTNSKLTLKPIVLAAEGLENPSSAVNEIVELKGWRVAINVLTKVHPTVVRRDALGRPRYSSRSNLPTSWTIE

SEQ ID NO: 273 - protein, 1181 aa, Actinomyces sp.
MLHCIAVIRVPPSEEPGFFETHADSCALCHHGCMTYAANDKAIRYRVGIDVGLRSIGFCAVEVDDEDHPIRILNSVVHVHDAGTGGPGETESLRKRSGVAARARRRGRAEKQRLKKLDVLLEELGWGVSSNELLDSHAPWHIRKRLVSEYIEDETERRQCLSVAMAHIARHRGWRNSFSKVDTLLLEQAPSDRMQGLKERVEDRTGLQFSEEVTQGELVATLLEHDGDVTIRGFVRKGGKATKVHGVLEGKYMQSDLVAELRQICRTQRVSETTFEKLVLSIFHSKEPAPSAARQRERVGLDELQLALDPAAKQPRAERAHPAFQKFKVVATLANMRIREQSAGERSLTSEELNRVARYLLNHTESESPTWDDVARKLEVPRHRLRGSSRASLETGGGLTYPPVDDTTVRVMSAEVDWLADWWDCANDESRGHMIDAISNGCGSEPDDVEDEEVNELISSATAEDMLKLELLAKKLPSGRVAYSLKTLREVTAAILETGDDLSQAITRLYGVDPGWVPTPAPIEAPVGNPSVDRVLKQVARWLKFASKRWGVPQTVNIEHTREGLKSASLLEEERERWERFEARREIRQKEMYKRLGISGPFRRSDQVRYEILDLQDCACLYCGNEINFQTFEVDHIIPRVDASSDSRRTNLAAVCHSCNSAKGGLAFGQWVKRGDCPSGVSLENAIKRVRSWSKDRLGLTEKAMGKRKSEVISRLKTEMPYEEFDGRSMESVAWMAIELKKRIEGYFNSDRPEGCAAVQVNAYSGRLTACARRAAHVDKRVRLIRLKGDDGHHKNRFDRRNHAMDALVIALMTPAIARTIAVREDRREAQQLTRAFESWKNFLGSEERMQDRWESWIGDVEYACDRLNELIDADKIPVTENLRLRNSGKLHADQPESLKKARRGSKRPRPQRYVLGDALPADVINRVTDPGLWTALVRAPGFDSQLGLPADLNRGLKLRGKRISADFPIDYFPTDSPALAVQGGYVGLEFHHARLYRIIGPKEKVKYALLRVCAIDLCGIDCDDLFEVELKPSSISMRTADAKLKEAMGNGSAKQIGWLVLGDEIQIDPTKFPKQSIGKFLKECGPVSSWRVSALDTPSKITLKPRLLSNEPLLKTSRVGGHESDLVVAECVEKIMKKTGWVVEINALCQSGLIRVIRRNALGEVRTSPKSGLPISLNLR

SEQ ID NO: 274 - protein, 1120 aa, Actinomyces sp.
MNAMKQYNAGIDVGINSVGFAAIEVDSKGLPLNILNNMVVLHDSGVDPGTAKTGATRLANSGTARRTRKLIARRRKRLQKLDRYIEVQGWPLVDFSSLPDPYTPWKIRAKLTQDRLEGEEQGRGLSIALRHMARHRGWRNPYEGVESLHSPKEASKQFKDLKDRVTKVSGVIFDEDATPAEVVCDIGLSPKQRLRSAPSAKYKEGATLADEPVGGKSKEGLLGGKLMQSDNANELRKIGIVQGLSNEKVNEIIDQVFASESPKGQAGKRAKKDELPGQEQYVRALRAHLAFQRFRIVAAVANLRILEAEPKHERLLSQSEKDKVIEFLMSADGDDGVTWSDVAEELGIERECLSGTAKRGADGERPSSFPPTNSTNISIVRSKVKPLIEWWRKASDDEQATLVTALSNADELTDDQPSAETVRQFLSSPDEQSQEKIDKISLPKGRAAYSVNSLERLTRRMLKDSVDLFEARKREFGVDNNWTPTPDSIGEPVGNPAVDRVLKIVNRWLLAVTRKWGPPKVVNIEHVRVGFTSAAQTRKYEEENKTNRERNLAILEELRDKFGTSGKIRREDITRFAALRRQNCQCAYCGEAITFFDCEMDHIVPRKGPGSTNTRNNLVAICERCNKSKSNMPFSLWAQNCDIPGVSVEAVIDRVRTWIKDPELNPKQYNNFKKDVIERLRKTVDDDAIDNRSIESVAWMATELADRIGSHFRTAGANTKVRVYRGWLTSEARKASGFEGKINLIGGRGKTRLDRRHHAMDAATIALMRQSVAQTLVERASIRESDRLRRVVSSSWKDYRGADRDKQFSYGSWLNSMNALAELFNRAIDADGIPVTQNLRLRLGNGEAHDATIRSLEKKRVGASWTIGEIDRASTPQLWLALTRQEDFDQNDGLPANASRELRVKNHWFHAEENVTLFPTKSAAIAVRGGYAEIGNTIHHARLYKLPGKKLTYGMIRVFAIDLLCAWHTDLFSSPLLPESISLRTAETKVRRAVEDGAAMYIGWLVDGDEIVLDPETKAFKSNKIGEYLCEFPGTKRWKVDGFPDKEKLRLRPLQLAGEGLPEDVSAGTEEILGPKGNGWRVAINALFKSSQLVVVRRTALGMVRKLSRRHLPLTTRLRG

SEQ ID NO: 275 - protein, 1095 aa, Actinomyces sp.
MPAHHLRVGIDVGTHSVGLATLRVDDQGTPIELLSALSHIHDSGIGKEGQKDHDTRKKLSGVARRTRHLLRNRRERLQQLDKVLVDLGFPIPKPEEYPDLSERTDPYRVWRVRARLVEETLPEELRGPAISMAVRHIARHRGWRNPYSKVESLLSPAEESSFMKALRKRIMTKTGEVLDDDITPGQAMAQVALTHKIYMRGPEGILGKLHQSDNANEIRKICARQGISSDVCKQLLRAVFKAESPRGSAVSRVAPDPLPGQGSFRRAPKCDPEFQRFRIISIVANLRISETKGENRPLTVDERRQVVAFLMEDSQADLTWVDVAEKLRVSRQALRGTAMLTADGERSAAQPPIDVTDQIMRKTKISALKTWWDKADAERRGAMVRYLYEGLEDSECAEVIAKLPEKDHAKLDSLHLPAGRAAYSRESLTALSDHMLETTNDLHEARKRLFGVDDSWAPPAEPVGAPVGNPSVDRTLKIVARYLSAVESIWGTPEVIHVEHVRDGFTSERTAEERDKANRSRHNDNQKAIEKIQHDYGKEGYISRGDIVRFHALKLQGSACLYCGTTIGYHTCQLDHIVPQAGPGSNNRRGNLVAVCERCNHSKSNTPFAVWAQKCGIPHVGVKEAISRVNGWVEHNHSTSSGDLTRLKKEVIARLRRTQKDPEIDERSMESVAWMANELHHRIAAAYPETTVMVYRGSITAAARKAASIESRINLIGEKGRKDRLDRRHHAVDASVVALMEPSVAKTLAERSSLRGEQRLTGQEQTWKQYTGLTVGARERFEAWRGHMHRLTELFNESLAADEVYVTQNIRLRLSDGSAHTVKASKLVSHRLGDGLTVQQIDRACTPALWCALTREIDFDEKNGLPAREDRVIRVHGQEISSADCIQVFSKRKKTKSDRDEAPFGAIAVRGGFVEIGSSIHHARIYRIEGEKPAYAMLRVFTHDLLSQRHGDLFSAVIPPQSISMRCAATELRQAISEGRATYLGWIVSGDELHIPVETFTTHKIGSFLKDYPNTTRWRICGYDSETMLILKPRILSAEGLNNSSDIAEYVIKNKGWRVAINKLAKVHPTVVRRDALGRPRHSSRSNLPVTWSIE

SEQ ID NO: 276 - protein, 1144 aa, Actinomyces sp.
MSMIDSSENVPGIRYRVGIDVGLKSIGFCAVEVDRNDQPVRMLNSMVFIHDAGVDPNENKAAKSRKLTAGVARRTRRLYRTRHQRLVNLDRVLSKEFGWPLPDLTSFKDPREPWHVRAGLLEGYIADDEKRKEALSIALRHIARHRGWRNPYAKVETLLQPSEPSDFLKGLNDRISEELGRAFPADATPGQLVDTYLAHPDYVGRAGTPKLRGPQGILAGKLHQSDNAQEIRGICDVQRIEPAERDRLIRVVFEAKSPKGSAKERGLVGYDELPGQGRHVRAEKAHPAFQLFRMVSVLANLRIREGREERPLTPDELEDLVDFINQVSLKQEVTWQDLADKLRIERADLRGTAKASFDGSPVLRNPPTDVTTEKIMACKVKWLKEWWKEADDEQRGYMVDAFSNSGGSEDGTDVNDEVAELLEQATEDDQLEFEKISLPQGRAAYSLDSLRRLTDRMLRDGVDLHTARRLEFNVGDDWKPAVEPIGAPTGNPAVDRVLKQVSRWLHAATERWGEPTVINIEHARDGLGSERVARELMRENEKRRKANASAVAEMAAKLKLSGKVHRSDQIRYFALQRQNCQCLYCGAPITYTTAEMDHIVPRADGSSTNDRSNLAAVCRTCNHMKGKIPFAVWASSDKANQGVSLTGALERVNMWQRDSGMSPRQLKQLQREVCARLKSKKPDQEFDGRSMESVAWMAVELRTRIEGFYRSRDEESVPSVGVYRGQLTAEARRASGFESRVNLIGGRGKTRFDRRHHAMDALVIALMNPSVSRTLALRLNMRDAQRLTGVEETWKHFYGKPGEASKRFESWRESMLRGVELFNIALSDNAIPFVENIRLRVGSSVIHDATVHSFCPPKTPDGKQIITKGYGEQHSLGSAMPVELIDRAETPALWTALTRCPDFDPKKGLPENPQRTISVNGTRVGPTELVNFFEFSKSGPKACLKVRGGYVDLSGAIHHARIYRIAGKKTAYAMIRVFQVDLLRLKDHDVFTTPLKPSTISMRTAEPKIREALANGTATQIGWLVEGDELVIDTSKYSGGFIGEVLARYPEATSWRVAGFMTPAKLRIKPILLSKEGFVDETQAALLGVEVTSEAIQKTVDRPGWLPAVNVLFGAGGVRVIRRNCLGEERYHSSASLPVSMTLE

SEQ ID NO: 277 - protein, 1103 aa, Actinomyces sp.
MTKINDDLRYRVGIDVGLKSIGFCAVEVDENDQPLRLLNSMVFVHDAGVDPNENKAAKSRKLTAGVARRTQRGTAQNRRRLAELDRALSEELNWPLPNLEDFEDSYEPWHTRAELVEHYIKDDAERAEALAIAIRHIARHRGWRNPYLSVDSLLTPQEPSKFLRGLNERVTQALGREFPADATPGQLICAYIDSPKYAETQGIRGDSGILSGKLHQFDNVGEIRKICEVQRLDHDVFKLLVRKVFFAKSPRGSAAGLVGHDQIPGQGKYIRAEKAHPDFQLFRIVAVLTNLRIREGKAERCLTPDELRGLVDYILEVQLKQQVTWADLADNLGIERTDLRGTARASFDGSPALRFPPTDVTAEKIMASKVKWLKDWWDKADSERRGFMVDALSNSGGSTGDNDIDDEVAALLEAATEDEQAELEKIQLPQGRAAYSLDSLRRLTKRMLEEGVDLHTARKEEFNVDDDWRPEPEPIEAPVGNPAVDRVLKQVARWLNMATDRWGVPDVINIEHTRDGLGSEKVARELLRESQKRQDLNQKDMDKMIRELGISGKARRSSLIKYQAIQRQNSMCLYCGTEIGFETAEMDHIVPRALSGSTNDRSNLAAVCRACNHQKGAVPFAVWATSGEAHAGVSLEDAIKRVRLWQKGPGMSPKQHKAFQNEVISRLKSRKPDEEFDGRSMESVAWMAVELRTRIDGYYRKVNSDSVPKVGIYRGQLTAEARKASGFENRVNLIGGKGKTRFDRRHHAMDALVIAMMNQSVSQTLALRVNMRESQRITGQEETWKNFYGKPGQASERFEKWREGMLRAVELFNIELAKNAIPFHENVRLRVGSSKVHDDTVRKFIHAKLGEALSVAMIDCAETPALWTALTRLPDFDPKDGLPEDLSREIYIHSRKITADEQLNFFNSPSACLKVRGGYVEIGSSIHHARVYRIDGKKTTYSMVRVFATDLVKMTHEDVFTTPLKPSTISMRTADPKIRKALADGTATQIGWLVEGDELQLETDKYSGGLIGEVLAEYPQLTSWRVAGFYGVTQLRLRPYMLAAEGIPSDASESLRKVIEGKGWLPAINALLSSGCVKVVRRNCLGEPRFNAKSSLPVSQLLR

SEQ ID NO: 278 - protein, 1114 aa, Actinomyces turicensis
MQFHFYMVYVTMKGMNDKDASQQLRYRVGIDVGTHSIGFCAVEVDESGMPIQLLNSMVHKHDSGIDPGGNDTATTRLAEAGVARRTRRLIRRRKKRLQELDAFIEECGWPLVDLATITDARSPWRIRAHLATEHIDDEAEQGKLLSIALRHMARHRGWRSPYARISSLHIQADPSEQLKALAQRVSEKTGISLTADQTPAQLISVYLDVFETGKLRGPEGILGGKLMQSDNANELRRIATVQGLDNDLLKKIIGFVFAAESPKGSAAKRVGKDVLPGAHGLRAEKAHPAFQQFRIVSIVQNLRIKEGTGLRALTSEETEIVVDFLNQAGLTEAPTWEEVADNLEIPRSHLKGTATEGFDGIAPSTRPPFDVTSQKILNGKLKKLSAWWKDADYDHRCAMVNALSNVGSDDEGSLADDDVREFLSDFTDEELEALDKVELPGGRAAYSVDSLEKLTNTMLSEGCDLHSARKIAFGVDDSWTPPAEPIGQPVGNPAVDRVLKQVARWISAATNQWGTPESVNIEHVRDALGSEKASREYQRSLQTRRIRNEKLFAEMRERLDIGGKPRRSELTRYLALQRQNCQCLYCGMPITYTDAEMDHIVPRKGAASTNTRENFAAVCRACNHQKSNLPFAVWAEKTERPGVSVKEAYKRVSDMRIEPGMNGRQMNEFRKAIRLRLTTKHADAEIDGRSLESVAWMANELRHRIEGFYRSAENDVTVRVFRGAVTAEGRRASGFESRVNLIGGKGKTRLDRRHHAMDALTIALMEPGIAQTIALRMNMRESQRVLGEQETWKSFTGGSDTARKRWEHWCEEMLRASELFNVFLAEDRIPICQNKRLRLGSSAVHKAIVQPFEASDKRIVSDAMPVELIDRASTPALWTALTRDPDFDPKEGLPANPSRTIRLHDKRLGPNETVEFFPTAAACLAIRGGYCEIGAGIHHARIFRISGKKTTYAMLRVYQCDLVRFQKENLLTVELPANTISVRTAVPKLREALAHGTAEQIGWLVVGDELKIDLSGFTTGQIETFNETYPQATRWEVTGFPTKTQLRLKPLLIASEGLADDVPDDIVKIVKGPGWWPAIDKLLKIGNVVLYRRDTHGKPRVVSHRSLPLSSKLQ

SEQ ID NO: 279 - protein, 1113 aa, Alcanivorax sp.
MRYRVGLDLGTASVGAAVFSMDEQGNPMELIWHYERLFSEPLVPDMGQLKPKKAARRLARQQRRQIDRRASRLRRIAIVSRRLGIAPGRNDSGVHGNDVPTLRAMAVNERIELGQLRAVLLRMGKKRGYGGTFKAVRKVGEAGEVASGASRLEEEMVALASVQNKDSVTVGEYLAARVEHGLPSKLKVAANNEYYAPEYALFRQYLGLPAIKGRPDCLPNMYALRHQIEHEFERIWATQSQFHDVMKDHGVKEEIRNAIFFQRPLKSPADKVGRCSLQTNLPRAPRAQIAAQNFRIEKQMADLRWGMGRRAEMLNDHQKAVIRELLNQQKELSFRKIYKELERAGCPGPEGKGLNMDRAALGGRDDLSGNTTLAAWRKLGLEDRWQELDEVTQIQVINFLADLGSPEQLDTDDWSCRFMGKNGRPRNFSDEFVAFMNELRMTDGFDRLSKMGFEGGRSSYSIKALKALTEWMIAPHWRETPETHRVDEEAAIRECYPESLATPAQGGRQSKLEPPPLTGNEVVDVALRQVRHTINMMIDDLGSVPAQIVVEMAREMKGGVTRRNDIEKQNKRFASERKKAAQSIEENGKTPTPARILRYQLWIEQGHQCPYCESNISLEQALSGAYTNFEHILPRTLTQIGRKRSELVLAHRECNDEKGNRTPYQAFGHDDRRWRIVEQRANALPKKSSRKTRLLLLKDFEGEALTDESIDEFADRQLHESSWLAKVTTQWLSSLGSDVYVSRGSLTAELRRRWGLDTVIPQVRFESGMPVVDEEGAEITPEEFEKFRLQWEGHRVTREMRTDRRPDKRIDHRHHLVDAIVTALTSRSLYQQYAKAWKVADEKQRHGRVDVKVELPMPILTIRDIALEAVRSVRISHKPDRYPDGRFFEATAYGIAQRLDERSGEKVDWLVSRKSLTDLAPEKKSIDVDKVRANISRIVGEAIRLHISNIFEKRVSKGMTPQQALREPIEFQGNILRKVRCFYSKADDCVRIEHSSRRGHHYKMLLNDGFAYMEVPCKEGILYGVPNLVRPSEAVGIKRAPESGDFIRFYKGDTVKNIKTGRVYTIKQILGDGGGKLILTPVTETKPADLLSAKWGRLKVGGRNIHLLRLCAE

SEQ ID NO: 280 - protein, 1146 aa, Alicyclobacillus hesperidum
MAYRLGLDIGITSVGWAVVALEKDESGLKPVRIQDLGVRIFDKAEDSKTGASLALPRREARSARRRTRRRRHRLWRVKRLLEQHGILSMEQIEALYAQRTSSPDVYALRVAGLDRCLIAEEIARVLIHIAHRRGFQSNRKSEIKDSDAGKLLKAVQENENLMQSKGYRTVAEMLVSEATKTDAEGKLVHGKKHGYVSNVRNKAGEYRHTVSRQAIVDEVRKIFAAQRALGNDVMSEELEDSYLKILCSQRNFDDGPGGDSPYGHGSVSPDGVRQSIYERMVGSCTFETGEKRAPRSSYSFERFQLLTKVVNLRIYRQQEDGGRYPCELTQTERARVIDCAYEQTKITYGKLRKLLDMKDTESFAGLTYGLNRSRNKTEDTVFVEMKFYHEVRKALQRAGVFIQDLSIETLDQIGWILSVWKSDDNRRKKLSTLGLSDNVIEELLPLNGSKFGHLSLKAIRKILPFLEDGYSYDVACELAGYQFQGKTEYVKQRLLPPLGEGEVTNPVVRRALSQAIKVVNAVIRKHGSPESIHIELARELSKNLDERRKIEKAQKENQKNNEQIKDEIREILGSAHVTGRDIVKYKLFKQQQEFCMYSGEKLDVTRLFEPGYAEVDHIIPYGISFDDSYDNKVLVKTEQNRQKGNRTPLEYLRDKPEQKAKFIALVESIPLSQKKKNHLLMDKRAIDLEQEGFRERNLSDTRYITRALMNHIQAWLLFDETASTRSKRVVCVNGAVTAYMRARWGLTKDRDAGDKHHAADAVVVACIGDSLIQRVTKYDKFKRNALADRNRYVQQVSKSEGITQYVDKETGEVFTWESFDERKFLPNEPLEPWPFFRDELLARLSDDPSKNIRAIGLLTYSETEQIDPIFVSRMPTRKVTGAAHKETIRSPRIVKVDDNKGTEIQVVVSKVALTELKLTKDGEIKDYFRPEDDPRLYNTLRERLVQFGGDAKAAFKEPVYKISKDGSVRTPVRKVKIQEKLTLGVPVHGGRGIAENGGMVRIDVFAKGGKYYFVPIYVADVLKRELPNRLATAHKPYSEWRVVDDSYQFKFSLYPNDAVMIKPSREVDITYKDRKEPVGCRIMYFVSANIASASISLRTHDNSGELEGLGIQGLEVFEKYVVGPLGDTHPVYKERRMPFRVERKMN

SEQ ID NO: 281 - protein, 1552 aa, Anaerophaga sp.
MFSQRNNPYCELLQNVKQLYKEKFGKTNQVDNSIIYGFMKRILGLDLGTNSIGWALVENDENDRKGKIIGMGSRIIPMDMSELDNFNKGASISKTAERTRLRMTRRLRERHLLRRARLHRILNIMGFLPEHYRNSIDFIDKKGCFFEGQEPKIAYKPDKNSEQFCFLFTSSFHEMLEDFRKFQPELIQNRKKVPYDWTIYYLRKKALTQKISKEELAWIILNFNTKRGYYHLRGEDEDNQDNKKIKEFRALKVVNVTEREGANSSGKKWYDMELENGWVYSRQSNLPPNLEGKTIELIVSYTLDNNGNIKKDKNGKEKYSLSMPGEEDWNLVKIKTENDLKTSKKSVGEYIYDHLLKNPDQKIRGKLISTIERKFYKEELSRILKTQMNFYEELKNRELYQKCVEELYPNNKSHQQTLLQKDFIHLIVEDIIFYQRPLKSKRAFVNNCPLEYRVYVDKKSGELIKSGVKCIPKSHPLFQEFRLWQYVRNLRIYERERMVNGRLMVNVDVTNELLPDEEHIVRLFDLLNDRKSFKQDDVLRFVGIKSPKDRKRYSWNYPEDKELPGNETRHLILAWLKKVDGVPEDWLDPEKLKALWHLLYSVTDREEIIKGLHSFAKKYELPDTFVEHFKKIPRLEREYGSFSEKAIKKLLPLMRMGKYWKAEEIPADLLEKAQKIIDAEADDRISDEVREKLLHLKDISQLKGLPLWQASYLVYGRHSETGEVVKWRTSEDLEKYILQFKQHSLRNPVVEQVILEALRVVKDIWEHYGEGKEGFFNEIHVEIGRELKNPADKRKKITSQIQENENTNLRIKALLEELFNDPSVKNVRPYSPAQQEILRIYEDGVLNGQKEIPDDILKISKMARPSKSQLVKYKLWLEQKYRSPYTGEIIPLSQLFTSAYEIEHIIPQARYFDDSFSNKVICEAEVNREKGHQLAFEFITKRGGDEIELNFGKKVTILNVEEYQKFVKDHYGRSLRSLSKMRKLLMEDIPDDFIDRQLNDSRYISKVVRNLLSNIVRAEDENSLVSKHLITCTGGVTTRLKHEWGLNDVWNELITPRFVRLNKMGKEKFGEWINKKGKQVFQIQMPLELQKGFNKKRIDHRHHALDALVVACASRSHVNYLNNDSARANASETRYDLRNKLCYKDKTDSNGNYRWKFYKPWESFTEEAKNRLAGTVVSFKSNRRIMTRSSNRYFKWVDTSEGKKKKLVRQIKGDNQAIRKPLHKDTVLGKVSLRKEKKVSLSKAIDLWESIVDKPLKKRIQSLREQGYDKKLLLKYFKDRNNQFNGQDISRVNIYFFDNNLAARRVTLDASFNSEKRIDGITDSGIKKILYAHLQNEKYHGKKDEKGNEISPYELAFSPEGLEEMNANIKKLNGGKPHCPIYKVRLAETIGEKFKLGEKGNKNKKYVEAAKGTNLFFAVYVDEKGVRSFETIPFSVALERRKQKLAVVPEENENKEKLLFYLSPNDLVYVPDEDEKLIDYRQLSINPTRIYKMVSSSGTQCFFIPHFVASPIVQTMELGPNNKSERAWDGQMIKNVCYKLSVDRLGNVKIEK

SEQ ID NO: 282 - protein, 1515 aa, Anaerophaga thermohalophila
MKRILGLDLGTNSIGWALVESDEEQKSGKIQGIGSRIIPMDQNELDNFNKGNTVSQTAERTRLRMVRRLRERHLLRRERLHRVLKEIGFLPEHYLEQIDFTEKPGGFLPGKEPKIAYKPDNFKDKYDFLFQDSYHEMLSDFQDKNPEFIQKRKKVPQDWTIYYLRKKALTAKITKEELAWIILNFNQKRGYYQLRGEDEDVAKNTKKEEFHALKVVKVKEREDSEGASGKWYDIELENGWVYPRQSNIRPDWEGKILELIVTYNLDKDGNIKTDKEGNEKRSFRMPNKDDWTLRKKRTENEIEKSGKTVGEYIYDNLLDAPDLKIRGKLVSTIERKYYRSELEQILTAQKKYHPELSNSELFNKCISNLYPNNDIHRKALLSKDFVHLIINDIIFYQRPLKSKRSTVSNCPLEYRVYVDKVTGEKKKVPLKCIPKSHPLYQEFRLWQYVKNLRLFEKERFENGRLLTNVDVTEQFLPDEDKYVELFEFLNGRKTFKQDDILKFAGIKSAKDRVKYYWNYPQEKEYPGNETRYLIESRLKKIENVPDEWLNYEKIEELWHLLYSVTDKVEIEKGLQSFAAKYQLPDLFVEVFKGFPRMEREYGAFSKKAIKKLLPLMRMGKYWKLENINPDLIEKVQKIIDGEADDNINDGIRERFSEINEMSDLRGMPLWKASYLVYGRHSEAAEVIRWRTSADLDQYIKDFKQHALRNPIVEQVVLEALRVVKDVWNYFGEGREKFFDEIHVEIGRDLKNPADKRQKIANQIQENENTNLRIKALLVELFNDPEVQNVRPYSPVQQQLLKIYEDGVLNAERDIPDDIQKISRMANPTRNQLIRYKLWLEQKYRSPYTGEIIPLNKLFTSEYEVEHIIPRARYFDDSFSNKIISEAEVNRKKDRMLAFEFIKKLGGSTIDLNYGKKVSVLTVEEYQQFVKDHYGINPHSRLKMQKLLMDEIPESFIERQLNDSRYISKMVRNLLSNIVREENENSPVAKQLITCSGSITNTLKQEWGLNDVWNTIITPRFERLNKMGEQKYGEWVNKEGKPVFQIQMPLELQKGFNKKRIDHRHHALDALIVASATRSHVNYLSNEAAKTNAKDTRFDLRNRLCYKEKRGQNRNFTWRFYKPWNTFTEDAKNALNDIVVSFKSNHRVINKSTNRYFKWENLPGGMKKKRLVRQEKGDNWAIRQSLHKDTVLGKVSLRKVKPVSLSVALDSWNNIVDKALKKKIRSLKDQGYDKKLMLKYFKDRRNEYNGENISRVNVYYFDEEMAARRVDLDTSFNSEKRIEGITDSGIKKIIYAHLKNEKYHGQKDDKGKDISPYELAFSPEGIAEMNANIKQLNGGKPHCPIYKVRLAEPVGEKFQLGETGNKTEKLVEVAKGTNLFFGVYANDEGVRSFATVPFYLAVEREKQGLPAVPQENENGDQLLFWLSPNDLVYVPSEEDAHFANPKQIELDNSRIYKMVSSTGTQCFFIPHFVATPIVQTIELGPNNKSERAWDGQMIKKVCYKLSVDRLGNVEIE

SEQ ID NO: 283 - protein, 333 aa, Bacillus cereus
MMNPNNFTKEDFWRTIILYGLNQATYKIALGQSLIRFSEQQRNVVSMNELAEDFFDMYLERLKNGKPQLATPNRQTAMERIINSYNIGRLTRSQAIEKVEREAFNDVIDRFHTVDSLQVPMKFYEKTDKGIVIFDNVFEIFSDNNNFELRNELDARWDLLESAFEIKRTDSQLVNDIRKLYLANGYERTDITKNRSVLNGYQSNVCFYCGELMSDDDVHVDHVIPRQLINHDDIWNLVLSHGFCNQQKSDNLPDVNYIEKLIERNEYFIKSNHPISNKLKERLGNTPRRRRTTIDRIYEHAKLVLAPWKGIYGYNPATDPFYKTFIRNIVLSK

SEQ ID NO: 284 - protein, 1068 aa, Bacillus cereus
MRYVLGLDIGIASCGWAVINQEKERIEDLGVRIFDKAENPKDGKSLAAPRRDARSTRRTLRRKKHRMQRIKILLVKQGLLFKTELNHLYESATEFDVWNLRLDALERKLHPKEFARVLIHLAKRRGFKSNRKETTLSENGQILESISENQQIMEQQNYRTVGEMILKDKKFENHKRNKDGTYIGTVTRQQLQDEIQMIFHTQRLYKNDYATEEFESSYLEIWASQRPYASKDQIEKMIGYCTLEPKEKRTPKASWSFQYFVALQTINNLRLISKDKIEELSFEEKKQIMNLALEKPIVKYIDIRKLLSIPNDFQFNSLSYSADTVDTTLENKRCIELKEYHSINKVYKQVYGKNTPNLLPIDYDTIAYGLTIFKDDKDILEYLQNKYVNAKGKPIKNLAKKTYDDTFIQALLNLNFTKMGHLSFKALKNIIPFLEEGLSYDKACEKAGYNFKGTSYTERTKYLPVIPQNTNPVVHRALSQTRKVINAIIKKYGSPNAIHIETARELSKTFQERKEIDSRYQDNSKKNEHAIHKLKELGNINPSGINIVKFKLWSEQDGRCMYSGKYIEPHRLFEEGYTEVDHILPYSRSLDDSYNNKILTLGTENQRKGNKTPYEYMGNTSIWDEFETRVQSNKKINFKKQQKLLLQNFSYAREQEFIERNLNDTRYATIYLTSLIQQHLIFSESSSKKKVRTVSGIITSHLRSRWGFNKDRKEGHIHHALDAVIVAVTSNHMIQRVTKYYKLKELNKNLQAKQLPFPEPWEGFRLELEARISPNTQQYLKGIHFKNYADVNLSDIKPIFVSRMPKRSITGELHQETIRKFLGYNEKGKVLTAIKTKLEDIPFDANGDFPMYGKETDLYTYNAIKERYLSHEKDKRKSFQEPLYKPTKSGEIGPLIKSIKIMDTRTIVNPVNQGKGVVYNSKIARTDVFKKEDKYYLIPIYTIDLLKNILPHKAITAGKGYEDWTTIDSSFTFLFSLFPNDLIQIVPSKNKTIKARTTVSKKEILLPSLTGYFKGVHSGTAGITVETHDGSVIANVGSKQLLLFEKYQVDVLGHYTKIKEEKRMGMAI

SEQ ID NO: 285 - protein, 1078 aa, Bacillus cereus
MRYVLGLDIGIASCGWAVINQEKERIEDLGVRIFDKAENPKDGKSLAAPRRDARSTRRTLRRKKHRMQRIKVLLVKHGLLSKTELDHLYESATEVDVWNLRLDALERKLYPKEFARILIHLAKRRGFKSNRKETTLSENGQILESISENQQIMEKQNYRTVGEMILKDKKFENHKRNKNGTYVGTVTRQQLQDEIQMIFHAQRLYKNDYATEEFESSYLEIWASQRPYASKDQIEKMIGYCTLEPKEKRAPKASWSFQYFVALQTINNLRLISKDRIEELSFEEKKQIMNLALEKSIVKYIDIRKLLSVPNEFQFNSLSYSADTVDTAVESRKCIELKEYHSINKVYKQIYGENALNLLPKYYDTIAYGLTIFKDDKDILEYLQNKYVNAKGKPISNFANKTYDDTFIQALLNLNFTKMGHLSFKALKNIIPFLEEGLSYDKACEKAGYNFKGTSYTEQTKYLPVIPQNTNPVVHRALSQTRKVINAIIKKYGSPNAIHIETARELSKTFQERKEIDSMYQDNSKKNEHAIHKLKELGNINPSGINIVKFKLWNEQDGRCMYSGKYIEPHRLFEEGYTEVDHILPYSRSLDDSYNNKTLTLGTENQRKGNKIPYEYMGNTSIWNDFETRVQSNKKINKKKQQKLLLQHFSYAREQEFIERNLNDTRYATIYLSSLIQQHLIFSESSRKKKVHTVSGIITSHLRSRWGFNKDRKEGHIHHALDAVIVAVTSDHMIQRVTKYYKLKELNRNLQAKRMPFPEPWEGFRLELEARISPNTQQYLKGLRFKNYADVNLSEIKSIFVSRMPKHSITGELHQETIRKFIGYNEKGKVLTAIKTKLEDIPFDANGDFPMYGKESDLYTYNAIKERYLSHKKDKRKSFQEPLYKPTKSGGIGPLIKSIKIMDTRTIVNPVNQGKGVVYNSKIARTDVFKKEEKYYLIPIYTIDLMKNILPQKAITAGKGYEDWTTIDPSFTFLFSLFPNDLIQIVPSKNKTIKARTTVSKKEVLLPSLTGYFKGVHSGTAGITVETHDGSVIANVGSKQLLLIEKYQVDVLGNYTKIKEEKRIGLTTYNDNKKIAAC

SEQ ID NO: 286 - protein, 1088 aa, Bacillus smithii
MNYKMGLDIGIASVGWAVINLDLKRIEDLGVRIFDKAEHPQNGESLALPRRIARSARRRLRRRKHRLERIRRLLVSENVLTKEEMNLLFKQKKQIDVWQLRVDALERKLNNDELARVLLHLAKRRGFKSNRKSERNSKESSEFLKNIEENQSILAQYRSVGEMIVKDSKFAYHKRNKLDSYSNMIARDDLEREIKLIFEKQREFNNPVCTERLEEKYLNIWSSQRPFASKEDIEKKVGFCTFEPKEKRAPKATYTFQSFIVWEHINKLRLVSPDETRALTEIERNLLYKQAFSKNKMTYYDIRKLLNLSDDIHFKGLLYDPKSSLKQIENIRFLELDSYHKIRKCIENVYGKDGIRMFNETDIDTFGYALTIFKDDEDIVAYLQNEYITKNGKRVSNLANKVYDKSLIDELLNLSFSKFAHLSMKAIRNILPYMEQGEIYSKACELAGYNFTGPKKKEKALLLPVIPNIANPVVMRALTQSRKVVNAIIKKYGSPVSIHIELARDLSHSFDERKKIQKDQTENRKKNETAIKQLIEYELTKNPTGLDIVKFKLWSEQQGRCMYSLKPIELERLLEPGYVEVDHILPYSRSLDDSYANKVLVLTKENREKGNHTPVEYLGLGSERWKKFEKFVLANKQFSKKKKQNLLRLRYEETEEKEFKERNLNDTRYISKFFANFIKEHLKFADGDGGQKVYTINGKITAHLRSRWDFNKNREESDLHHAVDAVIVACATQGMIKKITEFYKAREQNKESAKKKEPIFPQPWPHFADELKARLSKFPQESIEAFALGNYDRKKLESLRPVFVSRMPKRSVTGAAHQETLRRCVGIDEQSGKIQTAVKTKLSDIKLDKDGHFPMYQKESDPRTYEAIRQRLLEHNNDPKKAFQEPLYKPKKNGEPGPVIRTVKIIDTKNKVVHLDGSKTVAYNSNIVRTDVFEKDGKYYCVPVYTMDIMKGTLPNKAIEANKPYSEWKEMTEEYTFQFSLFPNDLVRIVLPREKTIKTSTNEEIIIKDIFAYYKTIDSATGGLELISHDRNFSLRGVGSKTLKRFEKYQVDVLGNIHKVKGEKRVGLAAPTNQKKGKTVDSLQSVSD

SEQ ID NO: 287 - protein, 1069 aa, Bacillus thuringiensis
MNYDIGLRIGITSCGWSIINKDLERIEDLGVRVFEKAENPDGTASAAPRREARKSRRKHRRKKHRIERIKRLIVQHDLLSKKELDSLYLSPFNIDVWNLRVEALERKLDNREFARVLIHLVQRRGFQTIRKSVEIQEEGKLLENVSENERIMKVNGYKTVGEMFSKHEKFTHHKRNKDGSYTSVVTRSLLLKEIKTIFNSQRILGNVFSTQKLESDYLYIWGSQRPTLTYEQLMSMVGNCIYEKKEKRAPKTSWAFQYFSLLQKINKLKVSDDNTLRKLSKEERDIVIELAFKKKNVSFVDIRKALKLNDNTKFNHLTYSHVVETKKVEKATFIELKGYHLIKKQLKDRNVELTQELQPKDYDAIAAASTFFKNDIEFRDYLRNQYLDSNGKRKSNIANKVFEDKVIAAVFELNFSKVCHLSFKSLYKLIPHLEKGLDYKEAILCAGYNFRDENKRDKKLFLPVIQQETNPVVHRALTQARKVINAIIREYGSPNTIRFVVANDLAKTYKQRKELESTLKKNRAENEKIKTKLLSMGIINPTGMDIVKYKLWYEQSGICLYTGRQMELSSLFKPGYSIVNHIIPYNRSFDDTYHNRVLTLTETKYEKGNKIPFEYFGAEETCWNEYEKRVSTSKKIHDKKREKLLIRNFDIEYENEMISNNVFDTHYIGSYFEKYIDEHLQFKKSTKKQKVFSIHGNMVAHLHSRWGFNKNSREIYLNHAVDAAIVAVLTDQLIRNIADYYRRDNILEQKGSLKFPEPWKSFSIELEARISPQVRDLIKKLNLDSYLDVDILHIKPVFISKKPRRKVNGEAHKSTIRSLIGINEIGKTVTCIKTRLEDIPFDENGDFPMYGKDTDKYTYTAIKERYLEFNKDKEKAFSTPLYKLKRNGEPGNQIKSVKIIDTRNIVNKVNQGKGIAYNSNIIRVDVFSRDQKYYVVPIYLRDFIKGSLPNKIITAAKGFMQWPETDNSYTFLFSIFPNDLIKVVPKEGKFIKAKNENKENINLTEILGYFKGLDSSTGAFTLESHDGSLLARGIGTKNLLLIEKYQVDVLGRYNKVGNEERQDIKIQQN

SEQ ID NO: 288 - protein, 206 aa, Bacteroides cellulosilyticus
MKKILGLDLGCNSIGWALVNEAENTEEISSIIKLGVRVNPLTVDEMQNFEKGKSITTNADRTLKRSMRRNLQRYKLRRDTLIEVLKEHGFITDSTLLSEHGNKTTFETYRLRAKAAVEEISLEKFARVLLMINKKRGYKSSRKAKGSEDGVLIDGMDVARKLYEEGLTPGELCLQILEAGKKNLPDFYRSDLQNEFDRIWNFQKLV

SEQ ID NO: 289 - protein, 349 aa, Bacteroides coprosuis
MKKILGLDIGTNSVGWAVVNTNQEGEPSQIEKLGSRIIPMSQDILDKFGQGQTVSSTASRTDYRGIRRLRERSLLRRERLHRVLHILDFLPKHYADSIGWDPRNSKTYGKFLPGTEVKLAWVPTADGHQFLFYSTYLEMLEDLKQTQAQLFETSQTPVPLDWTIYYLRKKALTQPITKHELAWLLLHFNTKRGYYQRRGELEDTPTDKLVEYHALKVVDVEVDPEDQSKKPWYFVHLENGWIYKRQSSEPLDNWKGLVKEFIVTTHLDKEGKPKLDKEGEVRRSFSSPKEDDWTLVKKKTENDLEKSGLTVGAYIYQTLLNKPNQKIRGGLIKHIERNYYVEELEQILR

SEQ ID NO: 290 - protein, 1504 aa, Bacteroides coprosuis
MKKVLGLDIGTNSVGWAVVNQNDKGEFLSIEKIGSRIIPMSQDVMDKFGAGQTESSTAQRTQYRGVRRLRERSLLRRERLHRVLHILHFLPQHYDAAIGWNKKENKTYGKFLPGVEVNIPWVATDQGHQFIFMDSYAEMLKDLKQHQPHLFEKSSTPVPLDWTIYYLRKKALTQAISKEELAWILLNFNQKRGYYQLRGEEVEDNTKREEFYALKVVKVELDKDNTSAKTWYKVHLENGFIYPCPSDTPIDSWVGMVKDFIVTTTLEKDGSEKRTADGEIKRSFRAPKEDDWTLLKKKTESELEKSGKQVGAFIYDTLLSNPDQKIIGGLIKTIERKYYKKELEQILETQQKFIAELSDKKLFQACAEELYPLNDSHRENLLERDFKHLFVQDIIFYHRPLKTKKSLISNCTYEYRTFYKNGEKQISPIKCIAKSNPLFQEFRVWQFVQNLRILQRQRSEGDSIKYNVDVTAEFLKDENDIANLFTWLNERKVIKQDQLLKSYFKLKVNKETKELDYRWNYVDDKNKEYPCNATRTHILSFLEKCKEEKRIEDDRFVYSLWHLLYSVVEPIELRGALAKFAEREHLHPSFVDVFAQFPPLEKEYGSYSEKAIKRLLPLMRMGDYWHEDKIDVKTKQRIQRIIDGEADDDITHRSREKVENLRSITDFKGLPLWKAGYVVYNRHSESGELTKWKTPHELSNYIQNEFKQYSLRNPIVEQIVLETLRVVHDLWVKHGDFSEIHLELGRDIKNSSDKRKRMAERQQENENSRQRVLEMLIDLKKEAAFADLNPYSPSQQEKLRIVEDGVLRSNIEIPKDIEKITKSAKPTSRELTKYRLWLDQKYRSPYTGQPISLAQLFTSKYEIEHVIPQAKYFDDSFTNKVICESEVNKEKGSMLAHEFILKNGGSTVNVGGRQVQVLKNDAYVELINRLYGKNNPVKAKKLLAEDIDEVVGDFSERQLNDTRYISRVVQKLLSNIVREEDEQESTSKHVIGCSGQVTTALKKDWGLNDIWNKIIQPRFERLNEMTATEDYGVWQSPNHFQIRVPEEIQKGFTKKRIDHRHHAMDALVIACATRSHINYISNRSGQDRNAKFETTRTDLRSKLCYKENSSGNNYNYIFNKPWDTFTQDAHRALENIVVSHKQNLRVLTKTNNYTQFINKDGKKDLQKQVKGDHFAVRKPMHQETIYGRVSIRSIKEVALKKALENWKQIVDRTLKDKIRELIGAYGKYDAQTILKYFKDRDYKFNNLKINRVEVYEYDHNCAAVRKSIGDDLTIKQIERITDESIRKILMNHLSNYDDNLKEAFSPEGLMEMNKNIKELNGGKNHQPIYKVRLFEDLGSKFPLGVSHNNPDKYAIAAKGTNLFFGIYEDQEGKRMFDSIPLNIVIDRLKEKKSPVPETYNESKLKFHLSPNDLVYVPTDEEQKQPELVDVDHLSDEQKGRVYKAVSFTGNRAFFVNHRVSKVIHDYVEFGTKNKIENDDDKRSLKHICWKLKVNRLGEITDVKR

SEQ ID NO: 291 - protein, 1509 aa, Bacteroides eggerthii
MKTILGLDLGTNSVGWAVINSVIKEQAERIWIEMAGSRIIPMDAAVLGDFDKGNSISQTSERTRLRGARRLRERQLLRRERLHKVLNILGFLPNHYLEYIDFEKHPGKFLADAEPKLAWVKDEQGKYTFLFQAAFDEMLADFAIHQPSLVSGDKKIPYDWTIYYLRKKALTEMISKEELAWILLNFNQKRGYYQLRGEEEEDNAGKSVEFYALKVLTVEATDEKKGRDVWYNVHLENGWIYRRSSSVPLDWEGQVKEFIVTTDLNPDGTPKLDKYGEVKRSFRAPKEDDWMLIKKRTEADIANTHKTVGAYIYDTLLQKPQQKIIGKLVKTVERKLYRDELSLILQKQCAFHAELQDRALYARCVEALYPSNEVRRKNIANRDFVYLLMDDILFYQRPLKTKKSLIANCPYEENEYVDRETGEIKKTPLKCIAKSHPLFQEFRLWNFLSNIRIYQKEKEINGTLHLDVDVTAEFLKTEDDYVALFDWLNSRKEIEQKTFLKYPKFGLKKEISNYRWNYVEDKQYPCNETRHAILSSLEKANVCIDFLSNEKEVALWHILYSVSDKQEIEKALRTFAAKNGLDESFVEAFKKFPPFKSEYGAYSAKAIKKMLPLMRCGKYWDVSSIDDTTKERIKKIVTGEYDERISVKVRDKVMNLSDISCFRRLPLWLACYIVYNRHSEDKEAVKWESPADIDAYLASFKQHSLRNPIVEQVITETLRVVRDIWKQVGRIDEIHIELGREMKNPADKRKRMTAQILENENANLRIKALLAEFMNPEYEIENVRPYSPSQQEILRIYEDTVLHAEDQLPEEIDAILKKFNSSKVPTKSEFLRYKLWLEQKYRSPYTGELIPLGKLFTAAYEIEHVIPQSRYFDDSFSNKVICESAVNKLKDNQLGYEFIKNHHGQKVEVGFGKSVEIFSVDSYERFVKEQYAKSAVKMKKLLMDDIPEQFIERQLNDSRYISKVIKGLLSNIVREKNDSGEYEPEAVSKNIVVCTGSVTDRLKRDWGMNDVWNSIVYPRFERLNSLTDTQSFGHWENKSGKKVFQTELPLEYQKGFSKKRIDHRHHAMDAIVIACATRNHVNYLSNESASRNAKISRYDLQRLLCDKNRTDDNGNYKWVIKKPWDTFTQDAREVLSKIVVSLKQNLRIINKTTNVYRHLDATGNRVYEKQKTGDSWAIRKPMHKDTVFGAVNLRKVKVVRLSVALDTPAMIVDKRVKNKVFELLSYKYDKKRIEKYFKENAFLWKELDLAKVAVYYFTEATTEPLVAVRKPLDSTFNEKKIKESVTDTGIQKILLNHLCTKEGKPDLAFSAEGIEEMNRNLLQLNNGKSHQPIYKVRVYEPRGNKFSVGVLGNKGTKWVEAAKGTNLFFAIYITEDGKRTYETIPLNVVIEREKQGLVPVPDRNKKGDKLLFWLSPNDLVYLPTEEEREFGRINEPIDRGRIYKMVSCTGNEGHFIPANVANPIVPVIELGSNNKAQRAWTNEMIKDICIPIKVDRLGHIIEVKYRIDE

SEQ ID NO: 292 - protein, 1526 aa, Bacteroides faecis
MKKILGLDLGTNSIGWAVLNAADDNSLKYIEAAGSRIIPMDAAILGDFDRGNSISQTAERTRIRGMRHLRERYLLRRARLHRILNLLGFLPFHYAQDIDRYGNFSADMEPKIAWCKNLEGELEFIFIESFNEMLEDFRKNQPELVADNKKVPYDWVIYYLRKKALEKKISKEELAWILLNFNQKRGYYQLRGEDDDESMKTAKTRQYFDKQIIKNIIDTNQTYKGQRILIVELQNGDKGKIFKKEIPDWIGQEKNIIVTVDIDKDGNDKYEESGSLSCRFKIPTDAEWESEWKLIKMKTQKDLDESNKTVGTYIYDSILQNPTQKVRGKLVRTIERKYYKAELKQILEKQTEFHSELQDKDLYIECLNELYSNNDTHRNAITDRDFVYLFMNDILFYQRPLKSKKSLIDNCPYERNIYIDKETGEIKYSPIKCIAKSHPLFQEFRLWKFISSIRIYQRESVVEVVDKQLDLFSSQSTSVQKLVTDVDVTDKFLTCENDYVALFEWLNKKKIIDQKEFLKYRPFGLKGDIDNYRWNYVEDKSYPCNETHAMILTYFAKAGISEDILTKEMEEALWHILYSVEDRQEITKALRTFASKYHLSDSFVKVFSNIPPFKKEYGSYSAKAIKKLLSLMRMGKYWSEDAIDVNTRERIDKIVTGEYDEKIRDRVREKTIRLNDIRHFRALPDWLACYVVYDRHSETREITEWKSPEEIDEYIRNFKQHSLRNPIVEQVITETLRTVRDIWKQVGCIDEIHVELGREMKNPADKRKRITSQIIENENANLRVKALLTEFVNSEFEIENVRPYSLSQQDILRIYEDGVLNSVAEVPGDIAGILKKFNENDAKKRPTTSEILRYKLWLEQKYRSPYTGEMIPLSKLFTSAYEIEHVIPQSRYFDDSFSNKVICEAEVNKLKDNALGYEFIKKHHGEKVELGFGKIVEIFSVSVYEQFVKDNYSRNRGKMKKLLMDEIPEQFIERQLNDSRYISKVVKTLLSNVVREKAEQEAVSKNVIVCTGGVTDRLKKDWGINDVWNKIVLPRFLRLNELTNSTNFTAKNAAGNEIPAMPLELQKGFNKKRIDHRHHAMDAIVIACANRNIVNYLNNESASRKAKISRHDLQAILCDKVRTDDKGNYQWRVKKPWDTFTQDVYVALENIIVSFKQNLRVINKTSNYYWHYENGKKVLVKQVKGDSWAIRKPMHKDTVFGEVNLRKVKSVSLNEALKNPQFIVEKDLKRQLLSLLQQNFDIKKIKKYFEEHKDIWSDISLSKMNIYYFTKETKDRYFATRKPLDASFDKKKIESCITDTGIQQILLRHLELKENDPERAFSPDGIDEMNRNIIQLNKGKGHHPIAKVRVYEKADKFEVGQRGNKSSKFVEAAKGTNLFFAVYETEYPDEKTNSIVRKRNYATIPLNIAIERQKRGLSTAPEDEKGNVPSFVLSPNDLVYLPTSEDIVNGHITQPIDKSRIYKMVSSSGSQCFFIKHNIANIIVDKYEFSPLNKMERAISNEMIKEICIPVKVDRLGNIVKLGKSE

SEQ ID NO: 293 - protein, 1509 aa, Bacteroides fluxus
MKTILGLDLGTNSVGWAVINSVIKEQAERIWIEMAGSRIIPMDAAVLGDFDKGNSISQTSERTRLRGVRRLRERQLLRRERLHKVLNILGFLPNHYLEYIDFEKHPGKFLSDAEPKLPWVKDEQGKYTFLFQAAFDEMLADFAIHQPSLVSGDKKIPYDWTIYYLRKKALTEMISKEELAWILLNFNQKRGYYQLRGEEEEDNAGKSVEFYALKVLTVEATDEKKGRDVWYNVHLENGWIYRRSSSVPLDWEGQIKEFIVTTDLNPDSTPKLDKYGEVKRSFRAPKEDDWMLIKKRTEADIANTHKTVGAYIYDTLLQKPQQKIIGKLVKTVERKLYRDELSLILQKQCAFHAELQDRTLYARCVEALYPNNEVQRRNIANRDFVYLLMDDVLFYQRPLKTKKSLIANCPYEENEYVDRETGEIKKAPLKCIAKSHPLFQEFRLWNFLSNIRIYQKEKEINGTLHLDVDVTAEFLKTEDDYVALFDWLNSRKEIEQKTFLKYPKFGLKKEISNYRWNYVEDKQYPCNETRHAILSRLEKANVCIDFLSNEKEVALWHILYSVSDKQEIEKALRTFAAKNGLDESFVEAFKKFPPFKSEYGAYSAKAIKKLLPLMRCGKYWDVSSIDDTTKERIKKIVAGEYDERIAVKVRDKVMNLSDISCFKRLPLWLACYIVYNRHSEDKEAVKWESPADIDAYLASFKQHSLRNPIVEQVITETLRVVRDIWKQVGRIDEIHIELGREMKNPADKRKRMTAQILENENANLRIKALLAEFMNPEYEIENVRPYSPSQQEILRIYEDMVLHAEDQLPEEIDAILKKFNSSKVPTKSEFLRYKLWLEQKYRSPYTGELIPLGKLFTAAYEIEHVIPQSRYFDDSFSNKVICESAVNKLKDNQLGYEFIKNHHGQKVEVGFGKSVEIFSVDSYERFVKEQYAKSAVKMKKMLMDDIPEQFIERQLNDSRYISKVIKGLLSNIVREKNDSGEYEPEAVSKNIVVCTGSVTDRLKRDWGMNDVWNSIVYPRFERLNSLTDTQSFGHWENKSGKKVFQTELPLEYQKGFSKKRIDHRHHAMDAIVIACATRNHVNYLSNESASRNAKISRYDLQRLLCDKSRTDDNGNYKWVIKKPWDTFTQDAREVLSKIVVSLKQNLRIINKTTNVYRHLDATGNRVYEKQKTGDSWAIRKPMHKDTVFGAVNLRKVKVVRLSVALDAPTMIVDKRVKNKVFELLSYKYDKKRIEKYFKENAVLWKELDLARVAVYYFTEATTEPLVAVRKPLDSTFNEKKIKESVTDTGIQKILLNHLCTKEGKPDLAFSAEGIEEMNRNLLQLNNGKRHQPIYKVRVYEPRGNKFSVGVLGNKGTKWVEAAKGTNLFFAIYITEDGKRTYETIPLNMVIEREKQGLAPVPDKNEKGDKLLFWLSPNDLVYLPTEEELEFGRINEPIDRGRIYKMVSSSGNQCFFIPQSISNAIIPTKELGANNKAERSWDGAMIKNICIPVKVDRLGRIIEVKYRINE

SEQ ID NO: 294 - protein, 1436 aa, Bacteroides fragilis; identical to SEQ ID NO: 160

SEQ ID NO: 295 - protein, 1512 aa, Bacteroides nordii
MKNILGLDLGTNSIGWAVINSEEDGPIVKKRIELAGSRIIPMDAAVLGNFDSGVTKSQTAERTSFRSIRRLRERQLLRRERLHKVLQILGFLPEHYVNDIDFENHPGKIKRNTEPKLPWRKNSMGQFEFIFQDSFEAMLTDFATHQPVFVSEGKKVPYDWTLYYLRKKALTEGISKEELAWLILNFNQKRGYYQLRGEEEEEQSNKLVEFYALRVVKVEATDDKKGKDTWYNVHLENGWIYRRTSNIPLDWEGKVKEFIVTTDLNEDGTPKLDKYGEVKRSFRAPKEDDWTLIKKKTESDIANSHKTVGCYIYDALLQNPHQKIKGRLVRTVERKFYKEELRLILEKQLSFHPELQDRDLYRACIDALYVSNEAHKNNISGRDFVYLFIDDIIFYQRPLKTKKSLIDNCPYEENQYMDRETGEVKQAPIKCIAKSHPLFQEFRLWQFISNIRIYQRERVLDDGKLETDVDVTPDFLKTEDDYTTLFEWFNDRKEVDQKAFLKNPQFGLKKTFTEYRWNYVEDKSYPCNETRNAILNGLQKAGVSADFLSREVEEALWHILYSVEDKIEIESALRKFASKHDLDDRFADVFKKLPPFKKEYGAYSAKAIKKLLPLMRIGKYWELSNIDDKTKERIDKIITGEWDENIHDRVREKAIKLSDITDFKGLPLWLSCYVVYNRHSEARAIAKWESPEDIDSYLRLFRQHSLRNPIVEQVITETLRTVRDIWKRVGQIDEIHVELGREIKNPADKRAKMTAQIVENENTNLRIKALLAEFINSEYEIENVRPYSSNQQEKLKIYEDTVLNGVKEIPEDINTILKKFRESDLKKRPTKSDFLHYKLWLEQKYCSPYTGRIIPLGKLFTSAYEIEHIIPQAHYFDDSFSNKVICEAEVNGLKDKKLGYEFIKHNPGKMVEIGFGKPPVRIFSVEEYERFVKENYSGIKNKMNKLLMDDIPETFIERQLNDSRYISKVVKSLLSNIVREKDSNGEYEPEAISKNVIVCTGSVTDRLKRDWGVNDVWNSIIYPRFERLNELTGSQQFGCWENKEGKRVFQTAVPLEMQKGFSKKRIDHRHHAMDAIVIACATRNHINYLSNESASKKAKISRTDLQRLLCTKCRTDDNGNYKWIVKKPWPAFTQDIRKALENITVSFKQNLRVINKTTNYYVHFDESGKKVLEKQINGDSWAIRKPMHKDTVFGKVNLQKVKEVRLSLALDTPKMIVDKKLKEKVLQLYSYKYDKKRIDKYFKENASLWKDLNLSKVAVYYFTNDSTEPLVAVRKPLDTSFNAKKIKESVTDTGIQKILLNHLSNNQDDPNLAFSPDGIDKMNKNLTALNDGKYHQPIYKVRVCEPQGNKFSVGTSGNKTSKYVEAAKGTNLFFAVYQTEDGKRSYETIPLNVVIEREKLGWTPVPENNNNGDKLLFWLSPNDLVYVPTADELNNGMRLDNMDKGRIYKMISCSGPQCFFIPQNVSNAIIPVIELGANNKAEKSWNNEMIKVVCVPIRVDRLGCITQINNQK

SEQ ID NO: 296 - protein, 779 aa, Bacteroides oleiciplenus
MKEGNQYDVACEYAGYRHSKSSLTREEIDNKVLKNRLEILPKNSLRNPVVEKILNQMVNVVNAVIDTYGKPDEIRVELARELKKGAKEREELAKSIAQNTREHEAIRQLLQTEFGMMHVTRNDIIRYKLYEELKDNGYKTLYSDQYIPREKVFSKEIDIEHIIPQARLFDDSLSNKTLEYRAVNIEKGNKTAYDFVKEKYGNDGLRRYLNHCEALFKDKKTKLKKLKMEDQDIPDGFIDRDLRNTQYIAKKALSMLSEISRRVVATTGSITDELRKDWQLVDIMKELNLPKYEALGFVETFKDKDGRIIKKIKDWSKRNDHRHHAMDALTVAFTKDVFIQYFNNKNAFWMSGSKEHANITAIKNKYFEKGKALAPIPLELFRTEAKHHLENILVSIKAKNKVVTNNINRTKKKNGENLKLQQTPRGQLHLESIYGSYRQCIIRDEKVNASFDASKIANVSKSAYRNALLKRLEAYDNDPKKAFTGKNSLDKNPVYLDENKMEKVPDRVKIVEFETVYTIRKPIDPKLSIDKVVDARIRTLLKKRLEEYGGDAQRAFSNIEENPIWLNKEKGISVKRVAIRGISNAQALHDKKDKDGNPILDKEGKGIPTDFVNTSNNHHVAIYRKPVVDKMGQVILDENGSPRYELGEDVISFFEAVARVNLRQPVVDKDYKRSEGWQFLFSMKQNEYFVFPNEKTGFNPKEIDLLNPENYALISPNLFRVQKIGLNDYTFRHHLETSIQNNSNELKFITWIRCGKNGINGVIKVRVNHIGQIVSMGEY

SEQ ID NO: 297 - protein, 653 aa, Bacteroides oleiciplenus
MKKILGLDLGSSSIGWALVNEGANDEEKSSIIKLGVRVNPLTVDEAQNFEKGKSITTNADRTLKRGMRRNLQRYKQRREALVEVLKKHEFITAGTLMSEQGNKTTFETYRLRAKAVEEEISLEEFARVLLMINKKRGYKSSRKAKGDEDGVLIDGMDVAKKLYDEDLNPGELCLQLLEAGKKTLPDFYRSDLQDEFDKIWNFQKQFNPESFCDTAKEEVRGKNRTQTWTILSKYFVWTEGDSVWNNEEARTEERIKEYKLVGIKRTTKGYEQKLENYRWRVQALSEQLNPEIIAIVLQEINGQISASSGYLGAISDRSKELFFNHQTVGQSLMSELDKNPNGSLRNKVFYRQDYLDEFNTIWEKQSLYHKELTVELKKEIRDIIIFYQRRLKSQKGLISTCEFEQREIIVEKDGKRKTKIIGCKVIPRSHPLFQEFKIWQTLNDVEVYVADRRTKRKQDRKSTTLFSDTEDILLVEGKRYLYQEEKELLAKELFVRENMKKAEVLKLLFEDPKELDLNFKQIDGNRTGFALFSAYSKMIEKYGYESVNFKNSADEIIEKLQIIFADLGWNTELFSIDLSKDDKELEKQPYFRLWHLLYSFEGDNTPTGNGKLIEALMRLCSVEKEYASVLANVSFQEDYGSLSAKAIKKYYLI

SEQ ID NO: 298 - protein, 1436 aa, Bacteroides sp.
MKRILGLDLGTNSIGWALVDEAENKDERSSIVKLGVRVNPLTVDELTNFEKGKSITTNADRTLKRGMRRNLQRYKLRRETLMEVLKEHKLITEDTILSENGNRTTFETYRLRAKAATEKISLEEFARVLLMINKKRGYKSCRKAKGAEEGTLIDGMDIARELYNNNLTPGELCLQLLDAGKKYLPDFYRSDLQNELDRIWEKQKEYYPEILTEVLKEELRGKKRDAVWAICAKSFVWEEYYTEWNKEKGKTEQQEREHKLEGIYSKRKRDEAKRENLQWRVNGLKEKLSLEQLVIVLQEMNIQINNSSGYLGAISDRSKELYFNKQTVGQYQMEMLDKNPNASLRNMVFYRQDYLDEFNTLWEKQAEYHKELTGELKKEIRDIVIFYQRRLKSQKGLVGFCEFESRQIEVEIDGKKKIKTVGNRVIPRSSPLFQEFKIWQILNNIEVTVVGKKGKRRKQKDNSPTLFDGLDDTEQLELNGSRYLYQEEKELLAQELFVRDKMTKSDVLKLLFDNPQELDLNFKTIDGNKTGYTLFQAYSKMIEMSGHEPVDFKKTVEKVVEHVKAVFDLLNWNTDILGFNSNEELDNQSYYKLWHLLYSFEGDNTPTGNARLVQKITELYGFEKEYAIILANVTFQDDYGSLSAKAIHKILPHLKEGNRYDVACAYAGYKHSESSLTKEEIANKALKDRLTLLPKNNLRNPVVEKILNQMVNVINAIIDTYGKPDEIRVELARELKKNAKEREELTKFIAETTRKHEEFKILLQSEFGLTNVSRTDILRYKLYKELESCGYKTLYSNTYIPREKLFSKEFDIEHIIPQARLFDDSFSNKTLEARSINLEKGNKTAYDFVKEKFGESGADNSLDHYLNNIEDLFKSGKISKTKYNKLKMAEQDIPDGFINRDLRNTQYIAKKALSMLNEISRRVVATSGTITDKLRQDWQLVDVMKELNWEKYKALGLVEYFEDKDGRQIGRIKDWTKRNDHRHHAMDALTVAFTKDIFIQYFNNKNASLNSNTNEYAIKNKYFQNGRAIAPIPLREFRVEAKKHLENTLISIKAKNKVVTGNINKTKKRGGVNKYLQQTPRGQLHLETIYGSGKQYLTKEEKVNASFDMKKIATVSKSAYRDVLLKRLHENDNDPKKAFTGKNSLDKQPIWLDKEQTRKVPEKVKTVTLETIYTVRKEISPDLKVDKVIDAGVRKILTGRLNEYGNDAKKAFSNLDENPIWLNKEKGISIKRVTISGISNAQSLHVKKDKDGKPILDEDSRNIPVDFVNTGNNHHVAVYRRPVIDKRGQLVIDEAGNPKYELEEVVVSFFEAVTRANLGQPIIDKDYKTSEGWQFLFSMKQNEYFVFPNEKTGFNPKEIDLLDAENYGVISPNLFRVQKFAHKNYVFRHHLETTIKDTSSILKGITWIDFRSSKGLDAIVKVRVNHIGQIVSVGEY

SEQ ID NO: 299 - protein, 1510 aa, Bacteroides sp.
MKRILGLDLGTNSIGWALVDSEEQRILGMGSRIIPMDQGVLDTFSGGNPVETQTAARTAYRGTRRLRERALLRRERLIRVLNMMKFLPEHYASQIDFEKRLGQFFDEKEPKLAWKQNDEGRFEFIFQQSFNEMIEEFKNKGVVREDKKIPYDWTIYYLRKKALSQEIEKEELAWILLNFNQKRGYYQLRGEEEEENPNKLVEYYSLKIVDVIADEKPNSKGDIWYSLHLENGWIYRRSSKIPLFGWKDKTRDFIVTTDLNDDGTVKKDKEGIEKRSFRAPSENDWVLLKKKTESDIEKSHKTVGAYVYETLLQNPMQKVRGKLVRTIERKFYKDELKQILEKQREFHPELRDEDLYNDCVRELYRSNETYQFILSKRDFVHLFLDDILFYQRPLRSQKSAIGDCILEFKTYKDKDGNNIKEYLKVISKSNPLYQEFRIWQWLYNLKIYRKEDDEDVTLQFIANIEDKEQLFDFLSNRKSIEQKPLLEYLIKAKGLKKQVKTEAYRWNYVEDKIYPCSETKTMISTRLAKVENIPDNFFTKEIEQKLWHIIYSVTDKNEFEKALRTFAKKYDLDIASFVDNFKKIPPFKNEYGSFSEKAIKKLLPLMRLGKYWKWNDIDNNTQNRISKIITGEYDEEIKDIVREKSIALTNENDFQGLQLWLAQYLVYGRHSEADIAGKWHSVADLEKYLNEFKQHSLRNPIVEQIITETLRVVRDIWRKYGQGAENFFSEIHVELGRDMKNTADERKKIVNVVTENENTNLRIKALLMELKNNSDGKLEVENVRPYSPTQQDILKIYEEYAISTGLDNEKDEKVKEDIKKISRVAQPTTTELQRYKLWLEQKYCSPYTGKVIPLGKLFTEEYQIEHIIPKSRYYDDSFSNKVICEAAVNKLKDKCLGLEFIKNYHGQIVETGFGQKVTIFDEEAYQNFVKQHYAYNRSKRTKLLLEEIPEKMIERQMNDTRYISKFVLPLLSNLVRAEENDNGVNSKNVLPVNGKITTMLKQDWGLNDVWNDLILPRFVRMNELAKTIAFTSWNEQHQKYLPTVPLELSKGFQKKRIDHRHHAMDALVIACATRDHVNLLNNKHANTDTIRYDLQRKLRLFERVTYIDPQTKNNVTKDIPKEFKKPWDNFTVDARNELEKIIVSFKQNLRIINKATNIYTKYENGKKIKVGQKGLNWAIRKPLHKETVFAKVSLRKRKTVRLSEALKDWKKIVDKKLKQEIKRLTCQYGKFDVDTILRYFKDRKYQFGEVDVSKVKMYYFDEENAAVRKNVDTSFTEKFIQGSVTDTGIQKILLNHLEAKGNKVEIAFSPEGIEEMNKNIIQLNEGKLHLPIFKVRVYETIGNKFSVGVKGNKKDKYVEAAKGTNLFFAIYVDENGIRSYETIPLNIVIERLKQGLSVVPEKNRKEHSLLFYLSPNDLVYVPIEDERENIHAVNLDQLNNEQRKRIYKMVSCTGSECHFVPYYVASPIVNKVEYSSLNKIGRSLTGEMIKDVCIKLKVDRLGNVKGISGL

SEQ ID NO: 300 - protein, 1436 aa, Bacteroides sp.
MKRILGLDLGTNSIGWALVNEAENKDERSSIVKLGVRVNPLTVDELTNFEKGKSITTNADRTLKRGMRRNLQRYKLRRETLTEVLKEHKLITEDTILSENGNRTTFETYRLRAKAVTEEISLEEFARVLLMINKKRGYKSSRKAKGVEEGTLIDGMDIARELYNNNLTPGELCLQLLDAGKKFLPDFYRSDLQNELDRIWEKQKEYYPEILTDVLKEELRGKKRDAVWAICAKYFVWKETYTEWNKEKGKTEQQEREHKLEGIYSKRKRDEAKRENLQWRVNGLKEKLSLEQLVIVFQEMNTQINNSSGYLGAISDRSKELYFNKQTVGQYQMEMLDKNPNASLRNMVFYRQDYLDEFNMLWEKQAVYHKELTEELKKEIRDIIIFYQRRLKSQKGLIGFCEFESRQIEVDIDGKKKIKTVGNRVISRSSPLFQEFKIWQILNNIEVTVVGKKRKRRKLKENYSAIFEELNDAEQLELNGSRRLCQEEKELLAQELFVRDKMTKSEVLKLLFDNPQELDLNFKTIDGNKTGYALFQAYSKMIEMSGHEPVDFKKPVEKVVEYIKAVFDLLNWNTDILGFNSNEELDNQSYYKLWHLLYSFEGDNTPTGNGRLIQKMTELYGFEKEYATILANVSFQDDYGSLSAKAIHKILPHLKEGNRYDVACVYAGYRHSESSLTREEIANKVLKDRLMLLPKNSLHNPVVEKILNQMVNVINVIIDIYGKPDEIRVELARELKKNAKEREELTKSIAQTTKANEEYKTLLQTEFGLTNVSRTDILRYKLYKELESCGYKTLYSNTYISREKLFSKEFDIEHIIPQARLFDDSFSNKTLEARSVNIEKGNKTAYDFVKEKFGESGADNSLEHYLNNIEDLFKSGKISKTKYNKLKMAEQDIPDGFIERDLRNTQYIAKKALSMLNEISHRVVATSGSVTDKLREDWQLIDVMKELNWEKYKALGLVEYFEDRDGRQIGRIKDWTKRNDHRHHAMDALTVAFTKDVFIQYFNNKNASLDPNANEHAIKNKYFQNGRAIAPMPLREFRAEAKKHLENTLISIKAKNKVITGNINKTRKKGGVNKNMQQTPRGQLHLETIYGSGKQYLTKEEKVNASFDMRKIETVSKSAYRDALLKRLYENDNDPKKAFAGKNSLDKQPIWLDKEQMRKVPEKVKIVTLEAIYTIRKEISPDLKVDKVIDVGVRKILIDRLNEYGNDAKKAFSNLDKNPIWLNKEKGISIKRVTISGISNAQSLHVKKDKDGKPILDENGRNIPVDFVNTGNNHHVAVYYRPVIDKRGQLVVDEAGNPKYELEEVVVSFFEAVTRANLGLPIIDKDYKTTEGWQFLFSMKQNEYFVFPNEKIGFNPKEIDLLDVENYGLISPNLFRVQKFSLKNYVFRHHLETTIKDTSSILRGITWIDFRSSKGLDTIVKVRVNHIGQIVSVGEY

SEQ ID NO: 301 - protein, 1424 aa, Bacteroides sp.
MKRILGLDLGTNSIGWALVNEAETDEEVSSIIRLGVRVNPLTVDETQNFEKGKSITTNAERTLKRSMRRNLQRYKLRRDALVEFLKELGFITDETILSEQGNRTTFETCRLRAKAAEEEISLEELSRVLLMINKKRGYKSSRKVKKEEDGVLIDGMEIAKKLYEEDLTPGQLCSQLLESGKKVLPDFYHSDLQEELDRIWSVQKQFHPDVFCDAAKEEIKGKNRSQTWAILANYFVWKEEVVGWNDREAKNETIEKECKLVGLKRTTKGYELKKENYRWRAQALTEQLGLEEIAVVLQEINGQINASSGYLGAISDRSKVLYFNHQTVGQYQMAELDKNPHASLRNMVFYRQDYLDEFDRIWEKQAEFHKELTAELKKEIRDMIIFYQRRLKSQKGLISFCEFERLEIVVEKDGKKQTKVIGCKVIPRSHPLFQEFKVWQTLNDIKVLGREKKRNALSASESRALYPEEKEILARELAIKENMKKADVLKLLFENPQELDLNFKQIDGNRTGFSLFSAYSKMIEKYGYEPLDFKKPADEIIGQLRTIFTDLGWNTNLFTIDLTKEGKELEMQPYFRLWHLLYSFEGDNTSTGNGKLIEKIMQLCGVEKEYAVELASLSFQDDYGSLSAKAIKRILPYLKEGNLYDVACEYAGYRHSKSSLTKEEIENKVLKGKLEVLPKNSLRNPVVEKILSQMVNVINTIIDTYGKPDEIRVELARELKKSAKEREELTKAIAKSTREHEEIRKLLQDEFGMMNVSRNDIIRYKLYEELKDNGYKTLYSNQYIPKEKIFSKEIDIEHIIPQSRLFDDSLSNKTLEYKAINIEKGNKTAYDFVKEKYGEEGLQQYINRCESLFNDKKAKLRKLKMEQKDIPDGFIDRDLRNTQYIAKKALAMLNEICRRVVATTGSITDQLREDWQLVDVMKELNLPKYEALGFVETYEDKDGRKIKRIKDWTKRNDHRHHAMDALTVAFTKDAFIQYFNNKNAAQDSGNRNHTNIIGIKTRYFDKGRALPPIPLEQFRIEAKQHLEKLLVSIKAKNKVVTVNVNRTKKRKGENTKIQQTPRGQLHLETVYGSHKQYVTKIEKVNASFDAAKIATVSKRAYRNALLKRLETFGNDPKKAFTGKNALEKNPLYADKYQTIRVPEKVQTVEFETIYTIRKPVDPALNVDKVVDVKVRAILERRLKEYGGDPKKAFVNFWENPIWLNKEKGISIKRVSIRGINNAQSIHVKKDKNGNPIWDENGKQIPVDFVNTGNNHHVAIYRKPVLDKKGQVTFDEDGNLMYELDEVVVPFFEAVTRANLGLPIIDKDYRKSEGWQFLFSMKQNEYFVFPNEKTGFNPKEVDLLNPDNYAMISPNLFRVQTMSKVMYGNNVVRDYKFRHHLETTVKDMKELKDIAYKQYKTLSFGNSVVKIRINHIGQIVSVGEY

SEQ ID NO: 302 - protein, 1055 aa, Bacteroides sp.
MRIYRKDLAQDVDVTNELLKTEEDYVALFDWLNGKKEIDQKAFLKYPLFGLKKEVENYRWNYVQDKPYPCNETRSSMLARLEKCDISIEFLTKENEEALWHILYSVEDKNEIVKALQKFADKHDLNASFVDVFQKFPPFKKEYGSYSAKAIKKLLPLMRMGKYWSENSIDKGTRERMDKIITGEYDEKIENRVREKAIHLADVSDFKGLPLWLVCYIVYGRHSEAKEITQWKSPADIDLYLRSFKQHSLRNPIVEQIIIETLRVVRDIWKQVGNIDEIHVELGREMKNPADKRKKMTQQMSENENTNLRIKYLLTEFLNPEYEVENVRPYSPSQQDILRIYEEGVLNSVSDLPEEISDILKKFTETDLKKRPSRSEVLRYKLWLEQKYRSPYTGEVIPLGKLFTPAYEIEHVIPQSCYFDDSFSNKVICEAEVNKLKSNLLGHEFIVKHHGEIVELPFGKKVRIFTVDEYEQFVKDNYSRTRSKMKKLLMDDIPEEFVARQLNDSRYISKVVKSLLSNIVREKGEEEAISKNVIPCTGGVTDRLKKDWGINEVWNKIILPRFQRLNELTGTNKFTTKNVGIQEIPTMPLELQKGFNKKRIDHRHHAMDAIIIACANRNIINYLNNESATAKAELSRYDLQKMLCDKAKTDNNGNYKWVIRKPWASFTQDTYLALENIIVSFKQNLRVINKATNHFLHYNEEGKKIFVKQGKGDNWAIRKSMHKDTVFGEVNLRRIKTVALNEAMKNPQSIVVKDFKRKLLELWNLGFDAKRIKKYFEDNRETWSDINLSKIEVYYFSKDTKDRFFATRKPLDTSFDRKKIENNITDTGIQKILLRHLELKDNNPDIAFSPDGIDEMNRNIIQLNNGKYHQPIIKVRWYEQADKFAVGQTGNKSSKFVEAAKGTNLFFAVYESNILDKKTNTIIKKRNYATIPLNVAIERQKQGLPVAPEDENGNDPIFVLSPNDLVYLPTAADLANGIIAQPLDRGRIYKMVSCTGNEGYFIPARIANPILQTIELGSNNKAQKAWTDEMIKEICMPIKVDRLGNVLESSSSYKK

SEQ ID NO: 303 - protein, 1055 aa, Bacteroides sp.
MRIYRKDLAQDVDVTNELLKTEEDYVALFDWLNGKKEIDQKAFLKYPVFGLKKEIENYRWNYVQDKPYPCNETRSLMLARLEKCDISIEFLTKENEEALWHILYSVEDKNEIVKALQKFADKHDLNASFVDVFQKFPPFKKEYGSYSAKAIKKLLPLMRMGKYWSENSIDKGTRERIDKIITGEYDEKIENRVREKAIHLADVSDFKGLPLWLVCYIVYGRHSEAKEIIQWKSPADIDSYLRSFKQHSLRNPIVEQIIIETLRVVRDIWKQVGNIDEIHVELGREMKNPADKRKKMTQQMSENENTNLRIKYLLTEFLNPEYEVENVRPYSPSQQDILRIYEEGVLNSVSDLPEEISDILKKFTETDLKKRPSRSEVLRYKLWLEQKYRSPYTGEVIPLGKLFTPAYEIEHVIPQSCYFDDSFSNKVICEAEVNKLKSNLLGHEFIVKHHGEIVELPFGKKVRIFTVDEYEQFVKDNYSRTRSKMKKLLMDDIPEEFVTRQLNDSRYISKVVKSLLSNIVREKGEEEAISKNVIPCTGGVTDRLKKDWGINEVWNKIILPRFQRLNELTGTNKFTTKNVGIQEIPTMPLELQKGFNKKRIDHRHHAMDAIIIACANRNIINYLNNESATAKAELSRYDLQKMLCDKAKTDNNGNYKWVIRKPWASFTQDTYLALENIIVSFKQNLRVINKATNRFLHYNEEGKKIFVKQGKGDNWAIRKSMHKDTVFGEVNLRRIKTVALNEAMKNPQSIVVKDFKRKLLELWNLGFDAKRIKKYFEDNRETWSDINLSKIEVYYFSKDTKDRFFATRKPLDTSFDRKKIENNITDTGIQKILLRHLELKDNNPDIAFSPDGIDEMNRNIIQLNNGKYHQPIIKIRWYEQADKFAVGQTGNKSSKFVEAAKGTNLFFAVYESNILDKKTNTIIKKRNYATIPLNVAIERQKQGLPVAPEDENGNDPIFVLSPNDLVYLPTDDELANGIIAQPLDRGRIYKMVSSSGEQCFFIKHIVANVLVDKFEFSPLNKMERALTGEMIKMICIPIKVDRLGNVLESSSSYKK

SEQ ID NO: 304 - protein, 286 aa, Bacteroides uniformis
MLSYKYDKKKIEKYFKENAFLWKELDIAKVAVYYFTENTTEPLVAVRKSLDSTFNEKKIASVTDTGIQKILLNHLKSKEGKAELAFSAEGIEEMNRNLLQLNDGKGHQPIYKVRVYEPRGNKFKVGVLGNKGAKWVEAAKGTNLFFAIYITEDGNRTYETIPLNWVIEREKQGLVPVPDRNEKGDKLLFWLSPNDLVYLPTEEERDFGRINEPIDRGRIYKMVSSSGNQCFFIPQSISNAIISTKELGSNNKAEKSWDGEMIKNICIPVKVDRLGRIIEVKYRVNE

SEQ ID NO: 305 - protein, 1508 aa, Bacteroides uniformis
MRTILGLDLGTNSIGWAVINSVIKEQTERIWIEMAGSRIIPMDAAILGDFDKGNSISQTAERTRFRGVRRLRERQLLRRERLHKVLKILGFLPEHYLKGIDFEKHTGKFLSGSEPKLPWVKDRWGKYSFLFQTAFNEMLADFAKHQPSLVFDGKKIPYDWTVYYLRKKALTEMISKEELAWILLNFNQKRGYYQLRGEEEEDNAGKSVEFYALKVLSVEATDEKKGRDIWYNVHLENGWVYRRSSNVPLDWEGRVKEFIVTTDLNPDGTPKLDKYGEVKRSFRAPKEDDWMLIKKRTEADITGTHKTIGSYIYDALLQEPQQKIIGKLVKTVERKFYKEELNFILQKQCAFHAELQDRDLYMRCIEALYPGNEVQRRNIANRDFIYLLIDDVLFYQRPLKTKKSLIANCPYEENEYVNRKTGEIKTAPLKCIAKSHPLFQEFRLWYFLSNIRVYQKEREVNGTLHLDVDVTTEFLKTEDDYVALFDWLNSRKEIDQKAFLRYPAFGLKKEINNYRWNYVEDKFYPCNETRHAILSRLEKAGIGIDFLSDEKETALWHILYSVSDKQEIEKALATFAVKNGLNESFVEVFKKFPPFKSEYGAYSAKAIKKLLPLMRCGKYWDMSLIDGTTKERIERIIAGECDESIGAKVREKAMNLSDISCFKRLPLWLACYVVYNRHSEDKEITKWETPADIDAYLAAFKQHSLRNPIVEQVITETLRVVRDIWKQVGKIDEIRIELGREMKNPADKRKRMTTQILENENANLRIKALLAEFVNPEYGVENVRPYSPSQQEILRIYEDAVLKGEEQIPEDIDVILKKFNTSKLPTKSEFLRYKLWLEQKYRSPYTGELIPLAKLFTAAYEIEHVIPQSRYFDDSFSNKVICESAVNKLKDNQLGYEFIKNHHGQKVEVGFGKTVEIFSVDSYERFVKEQYAKSGIKMKKLLMDDIPEQFIERQLNDSRYISKVVKGLLSNIVREKNDSGEYEPEAVSKNILVCTGSVTDRLKKDWGMNDVWNSIVSPRFERLNALTETQCFGHWENKDGKKVFQTAVPLEYQKGFSKKRIDHRHHAMDAIVIACATRNHVNYLNNESASRNAKISRYDLQRLLCDKSRGDGNGNYRWIIKKPWTTFTQDAREALSGIIVSLKQNLRIINKTTNIYQHFDANGTRVYEKQKIGDSWAIRKPMHKDTVFGAVNLRKVKVVRLSVALDTPSMIVNKRVKNKVLELLSYKYDKKKIEKYFKENAFLWKELDIAKVAVYYFTENTTEPLVAVRKSLDSTFNEKKIASVTDTGIQKILLNHLKSKEGKAELAFSAEGIEEMNRNLLQLNDGKGHQPIYKVRVYEPRGNKFKVGVLGNKGAKWVEAAKGTNLFFAIYITEDGNRTYETIPLNWVIEREKQGLVPVPDRNEKGDKLLFWLSPNDLVYLPTEEERDFGRINEPIDRGRIYKMVSSSGNQCFFIPQSISNAIISTKELGSNNKAEKSWDGEMIKNICIPVKVDRLGRIIEVKYRVNE

SEQ ID NO: 306 - protein, 1210 aa, Bacteroides uniformis
MRTILGLDLGTNSIGWAVINSVIKEQTERIWIEMAGSRIIPMDAAILGDFDKGNSISQTAERTRFRGVRRLRERQLLRRERLHKVLKILGFLPEHYLKGIDFEKHTGKFLSGSEPKLPWVKDRWGKYSFLFQTAFNEMLADFAKHQPSLVFDGKKIPYDWTVYYLRKKALTEMISKEELAWILLNFNQKRGYYQLRGEEEEDNAGKSVEFYALKVLSVEATDEKKGRDIWYNVHLENGWVYRRSSNVPLDWEGRVKEFIVTTDLNPDGTPKLDKYGEVKRSFRAPKEDDWMLIKKRTEADITGTHKTIGSYIYDALLQEPQQKIIGKLVKTVERKFYKEELNFILQKQCAFHAELQDRDLYMRCIEALYPGNEVQRRNIANRDFIYLLIDDVLFYQRPLKTKKSLIANCPYEENEYVNRKTGEIKTAPLKCIAKSHPLFQEFRLWYFLSNIRVYQKEREVNGTLHLDVDVTTEFLKTEDDYVALFDWLNSRKEIDQKAFLRYPAFGLKKEINNYRWNYVEDKFYPCNETRHAILSRLEKAGIGIDFLSDEKETALWHILYSVSDKQEIEKALATFAVKNGLNESFVEVFKKFPPFKSEYGAYSAKAIKKLLPLMRCGKYWDMSLIDGTTKERIERIIAGECDESIGAKVREKAMNLSDISCFKRLPLWLACYVVYNRHSEDKEITKWETPADIDAYLAAFKQHSLRNPIVEQVITETLRVVRDIWKQVGKIDEIRIELGREMKNPADKRKRMTTQILENENANLRIKALLAEFVNPEYGVENVRPYSPSQQEILRIYEDAVLKGEEQIPEDIDVILKKFNTSKLPTKSEFLRYKLWLEQKYRSPYTGELIPLAKLFTAAYEIEHVIPQSRYFDDSFSNKVICESAVNKLKDNQLGYEFIKNHHGQKVEVGFGKTVEIFSVDSYERFVKEQYAKSGIKMKKLLMDDIPEQFIERQLNDSRYISKVVKGLLSNIVREKNDSGEYEPEAVSKNILVCTGSVTDRLKKDWGMNDVWNSIVSPRFERLNALTETQCFGHWENKDGKKVFQTAVPLEYQKGFSKKRIDHRHHAMDAIVIACATRNHVNYLNNESASRNAKISRYDLQRLLCDKSRGDGNGNYRWIIKKPWTTFTQDAREALSGIIVSLKQNLRIINKTTNIYQHFDANGTRVYEKQKIGDSWAIRKPMHKDTVFGAVNLRKALIPQHYNLTLFISS

SEQ ID NO: 307 - protein, 1504 aa, Bacteroides vulgatus
MKNIVGLDLGTNSIGWAVVNGSVNDDGSEQLVKIQASGSRIIPMDAAMIGDFNKGNSISQTAERTRLRGVRRLSERYLLRRERLHRILDILGFLPFHFAQDLDRHGKIVKGKEPKLAWRKNEAGQFEFIFQDSFKEMLEDFKLNHPNLITDDKKVPYDWTIYYLRKKGLTSKISKEELAWILLNFNQKRGYYQLRGEEEEENKNKLVEFYALKVVAVEDSGEKKGKDIWYNVHLENGWVYRRTSNMPLDWVGKTKEFIVTTDLEKDGTPKKDKEGNVKRSFRAPKEDDWSLLKKKTEADIDQTHKTVGVYIYDTLLGNPSQKIRGRLVRTIERKYYKEELKQILEKQKEFHLELQDRALYAACIEELYPINEAHRNNVGNRDFTYLFLEDILFYQRPLKSKKSLIDNCPYEENQGLDKETGEIKSFPVKCIAKSHPLFQEFRLWQFIVNLRIYRKDLAQDVDVTNELLKTEEDYVALFDWLNGKKEIDQKAFLKYPVFGLKKEIENYRWNYVQDKPYPCNETRSLMLARLEKCDISIEFLTKENEEALWHILYSVEDKNEIVKALQKFADKHDLNASFVDVFQKFPPFKKEYGSYSAKAIKKLLPLMRMGKYWSENSIDKGTRERIDKIITGEYDEKIENRVREKAIHLADVSDFKGLPLWLVCYIVYGRHSEAKEITQWKSPADIDSYLRSFKQHSLRNPIVEQIIIETLRVVRDIWKQVGNIDEIHVELGREMKNPADKRKKMTQQMSENENTNLRIKYLLTEFLNPEYEVENVRPYSPSQQDILRIYEEGVLNSVSDLPEEISDILKKFTETDLKKRPSRSEILRYKLWLEQKYRSPYTGEVIPLGKLFTPAYEIEHVIPQSCYFDDSFSNKVICEAEVNKLKSNLLGHEFIVKHHGEIVELPFGKKVRIFTVDEYEQFVKDNYSRTRSKMKKLLMDDIPEEFVTRQLNDSRYISKVVKSLLSNIVREKGEEEAISKNVIPCTGGVTDRLKKDWGINEVWNKIILPRFQRLNELTGTNKFTTKNVGIQEIPTMPLELQKGFNKKRIDHRHHAMDAIIIACANRNIINYLNNESATAKAELSRYDLQKMLCDKAKTDNNGNYKWVIRKPWASFTQDTYLALENIIVSFKQNLRVINKATNRFLHYNEEGKKIFVKQGKGDNWAIRKSMHKDTVFGEVNLRRIKTVALNEAMKNPQSIVVKDFKRKLLELWNLGFDAKRIKKYFEDNRETWSDINLSKIEVYYFSKDTKDRFFATRKPLDTSFDRKKIENNITDTGIQKILLRHLELKDNNPDIAFSPDGIDEMNRNIIQLNNGKYHQPIIKIRWYEQADKFAVGQTGNKFSKFVEAAKGTNLFFAVYESNILDKKTNTIIKKRNYATIPLNVAIERQKQGLPVAPEDENGNDPIFVLSPNDLVYLPTDDELANGIIAQPLDRGRIYKMVSCTGNEGHFIPARIANPILQTIELGSNNKAQKAWTDEMIKEICMPIKVDRLGNVLESSSSYKK

SEQ ID NO: 308 - protein, 1153 aa, Barnesiella intestinihominis
MKNILGLDLGLSSIGWSVIRENSEEQELVAMGSRVVSLTAAELSSFTQGNGVSINSQRTQKRTQRKGYDRYQLRRTLLRNKLDTLGMLPDDSLSYLPKLQLWGLRAKAVTQRIELNELGRVLLHLNQKRGYKSIKSDFSGDKKITDYVKTVKTRYDELKEMRLTIGELFFRRLTENAFFRCKEQVYPRQAYVEEFDCIMNCQRKFYPDILTDETIRCIRDEIIYYQRPLKSCKYLVSRCEFEKRFYLNAAGKKTEAGPKVSPRTSPLFQVCRLWESINNIVVKDRRNEIVFISAEQRAALFDFLNTHEKLKGSDLLKLLGLSKTYGYRLGEQFKTGIQGNKTRVEIERALGNYPDKKRLLQFNLQEESSSMVNTETGEIIPMISLSFEQEPLYRLWHVLYSIDDREQLQSVLRQKFGIDDDEVLERLSAIDLVKAGFGNKSSKAIRRILPFLQLGMNYAEACEAAGYNHSNNYTKAENEARALLDRLPAIKKNELRQPVVEKILNQMVNVVNALMEKYGRFDEIRVELARELKQSKEERSNTYKSINKNQRENEQIAKRIVEYGVPTRSRIQKYKMWEESKHCCIYCGQPVDVGDFLRGFDVEVEHIIPKSLYFDDSFANKVCSCRSCNKEKNNRTAYDYMKSKGEKALSDYVERVNTMYTNNQISKTKWQNLLTPVDKISIDFIDRQLRESQYIARKAKEILTSICYNVTATSGSVTSFLRHVWGWDTVLHDLNFDRYKKVGLTEVIEVNHRGSVIRREQIKDWSKRFDHRHHAIDALTIACTKQAYIQRLNNLRAEEGPDFNKMSLERYIQSQPHFSVAQVREAVDRILVSFRAGKRAVTPGKRYIRKNRKRISVQSVLIPRGALSEESVYGVIHVWEKDEQGHVIQKQRAVMKYPITSINREMLDKEKVVDKRIHRILSGRLAQYNDNPKEAFAKPVYIDKECRIPIRTVRCFAKPAINTLVPLKKDDKGNPVAWVNPGNNHHVAIYRDEDGKYKERTVTFWEAVDRCRVGIPAIVTQPDTIWDNILQRNDISENVLESLPDVKWQFVLSLQQNEMFILGMNEEDYRYAMDQQDYALLNKYLYRVQKLSKSDYSFRYHTETSVEDKYDGKPNLKLSMQMGKLKRVSIKSLLGLNPHKVHISVLGEIKEIS

SEQ ID NO: 309 - protein, 1352 aa, Belliella baltica
MKKILGLDLGTTSIGWAFIKEPEKDVVGSEIVDMGVRIVPLSSDEENDFAKGNTISINADRTLKRGARRNLQRFKQRRNALLEIFKEKKLISTNFKYAEDGPSSTFSTLNLRAKAAKEKIELQDLVKVLLQINKKRGYKSSRKAKSEEDDGSAIDSMGIAKELYENDLTPGQWVYEALQKGRKNVPDFYRSDLQEEFKKIVNYQSEFFPDIFNASFVEDWMGKASTPTKQYFNKKGVQLAENKGKREERRLQEYKWRAEAVNFKIDLSEIALILSQINSQISNSSGYLGAISDRSKELYFKNLTVGQYLYQQIKKNPHTRLKGQVFYRQDYLDEFERIWSVQSSFYPQLNDALKREVRDITIFFQRRLKSQKHLISNCEFEDHHKVVPKSHPVFQEFRIWQNLNNLLLIKKDNLNEKFDLELESKIALANELAFKRELNVKDALKILGLKPNEWEFNFTKIEGNRTNQAFFDAFAKIIELEDGEPIDLGDLKADDILDQFSEAFLRIGIDTELLQVNSDIEGAEYEKQSYIQFWHLLYSSEDDQKLKLNLIRKFGFKPEHAKILASISLQDDHASLSSRAIKKILPHLQSGLIYDKACTYAGYNHSSSFTKDENEKRELRAELELLKKNSLRNPVVEKILNQMINVVNAILKDPELGRPDEIRVEMARELKANAEQRKNMTSNIASATRDHDKYREILKSEFGLKRVTKNDLLRYKLWLETDGISLYTGKPIEASKLFSKEYDIEHIIPKARLFDDSFSNKTICERQLNIDKANVTAFSFLQNKLSADEFEQYQSRVKSLYGKLSKAKIQKLLMANDKIPEDFIARQLQETRYISKKAKEILFEISRRVSVTTGTITDKLREDWGLVEIMKELNWEKYDKLGLTYTIEGKHGERLNKIKDWSKRNDHRHHAMDALTVALTKPAYIQYLNNLNAKGLNNKKGTEVFAIEQKYLKRENGKLCFIPPIENIRSEAKKHLSRILVSYKAKNKVVTINKNKTKSKAGLNEQIALTPRGQLHKETVYGKSFHYSTKFEKIGASFNVQKINTVAKKEEREALLKRLAENGNDPKKAFTGKNTLNKMPIYLDLGKNIKLSEKVKTVVLEQNYTIRKNIDPDLKVDKVIDVGIKRILESRLEEFGGNAKLAFSNLEENPIWLNKEKGISIKRVKISGVSNVESLHVKKDHFGEPILDQEGNEIPVDFVSTGNNHHVAIYEDENGNLQEEVVSFFEAVVRQNQGLPIIKKNHTLGWKFLFTLKQNEYFVFPSDDFVPADVDLMDEQNYHLISPNLFRVQKIARKNYVFNNHLETKAVDNDLLKSKKELSKITYHFYQTPEHLRGIIKIRINHLGKIIQIGEY

SEQ ID NO: 310 - protein, 1415 aa, Bergeyella zoohelcum
MKHILGLDLGTNSIGWALIERNIEEKYGKIIGMGSRIVPMGAELSKFEQGQAQTKNADRRTNRGARRLNKRYKQRRNKLIYILQKLDMLPSQIKLKEDFSDPNKIDKITILPISKKQEQLTAFDLVSLRVKALTEKVGLEDLGKIIYKYNQLRGYAGGSLEPEKEDIFDEEQSKDKKNKSFIAFSKIVFLGEPQEEIFKNKKLNRRAIIVETEEGNFEGSTFLENIKVGDSLELLINISASKSGDTITIKLPNKTNWRKKMENIENQLKEKSKEMGREFYISEFLLELLKENRWAKIRNNTILRARYESEFEAIWNEQVKHYPFLENLDKKTLIEIVSFIFPGEKESQKKYRELGLEKGLKYIIKNQVVFYQRELKDQSHLISDCRYEPNEKAIAKSHPVFQEYKVWEQINKLIVNTKIEAGTNRKGEKKYKYIDRPIPTALKEWIFEELQNKKEITFSAIFKKLKAEFDLREGIDFLNGMSPKDKLKGNETKLQLQKSLGELWDVLGLDSINRQIELWNILYNEKGNEYDLTSDRTSKVLEFINKYGNNIVDDNAEETAIRISKIKFARAYSSLSLKAVERILPLVRAGKYFNNDFSQQLQSKILKLLNENVEDPFAKAAQTYLDNNQSVLSEGGVGNSIATILVYDKHTAKEYSHDELYKSYKEINLLKQGDLRNPLVEQIINEALVLIRDIWKNYGIKPNEIRVELARDLKNSAKERATIHKRNKDNQTINNKIKETLVKNKKELSLANIEKVKLWEAQRHLSPYTGQPIPLSDLFDKEKYDVDHIIPISRYFDDSFTNKVISEKSVNQEKANRTAMEYFEVGSLKYSIFTKEQFIAHVNEYFSGVKRKNLLATSIPEDPVQRQIKDTQYIAIRVKEELNKIVGNENVKTTTGSITDYLRNHWGLTDKFKLLLKERYEALLESEKFLEAEYDNYKKDFDSRKKEYEEKEVLFEEQELTREEFIKEYKENYIRYKKNKLIIKGWSKRIDHRHHAIDALIVACTEPAHIKRLNDLNKVLQDWLVEHKSEFMPNFEGSNSELLEEILSLPENERTEIFTQIEKFRAIEMPWKGFPEQVEQKLKEIIISHKPKDKLLLQYNKAGDRQIKLRGQLHEGTLYGISQGKEAYRIPLTKFGGSKFATEKNIQKIVSPFLSGFIANHLKEYNNKKEEAFSAEGIMDLNNKLAQYRNEKGELKPHTPISTVKIYYKDPSKNKKKKDEEDLSLQKLDREKAFNEKLYVKTGDNYLFAVLEGEIKTKKTSQIKRLYDIISFFDATNFLKEEFRNAPDKKTFDKDLLFRQYFEERNKAKLLFTLKQGDFVYLPNENEEVILDKESPLYNQYWGDLKERGKNIYVVQKFSKKQIYFIKHTIADIIKKDVEFGSQNCYETVEGRSIKENCFKLEIDRLGNIVKVIKR

SEQ ID NO: 311 - protein, 1430 aa, Bergeyella zoohelcum
MKHILGLDLGTNSIGWAVVKEAQNDNEQSEIVDVGVRVNPLTTDEKTNFEKGKPISTNADRTLKRSARRNLQRYKLRRKELIELLKEHQLISTDTILTENGKGTTFQTLELRAKSAKEKISLEELARVFLTINKKRGYKSSRKAKNEDEGQLIDGMEIAKRLYEENLTTGQLSLQLLKEGKKSLPDYYRSDLQFELDKVWNFQKQFHSDILTDEFYAQLKGKGQRATSALFLAKYQIYTAENKGSREDKKLQAYQWRVDALSKELTREQLAFVITEINNNLNNSSGYLGAISDRSKELYFNNETVGEYLWKQIAANPHTSLKNQVFYRQDYLDEFEQIWKTQSAFYPEILTDELKKELRDVVIFYQRKLKSQKSLVSFCEFENKEIEIKKEDGTSTKKVIGLKVAPKSSPLFQEFKIWQNLNNVLIRKKGSKTKKVAKNQQAVLFEEEKTISELDLEAKQALFNELNLKGNLKADYCLEILGYSPKEWEMNYSVLEGNRTNKALYEAYLKITDLEGYDAKNHLKVKLNKDEVELDDLKVPASEIKDMVQAIFKEAGINTDILHFNAELDGKDFENQASYQLWHLLYSYEGDDSKSGNELLYKLLETKFGFKKEYAQILANVSLSDDYGSLSTKAMRKIHPYIKENKFSTACELAGYRHSKHSLTKEENDNRVLKDSLEVLKKNSLRQPVVEKILNQMINLVNALLKKYRTENPNFKFDEIRIELARELKKNAEERANMTANINKAKTEHEKIIKILKNEFGLPNPTRNDIIRYRLYEELKANGYKDLYTNIKIPQEKLFTKEIDIEHIIPKSRVFDDSFSNKTLSFRKTNLDKGERTAFDYMESKFGADKLEEYVARVEDLYKNNIISKAKYQKLLKKESEIGDGFVERDLRETQYIAKKAKEILLQITPNVLSTSGGITDRLREDWDLINVMKELNLPKYRALGLTQMEDRKYGQQVEVITDWTKRNDHRHHAMDALTVAFTKHNHIQYLNYLNARKNEKHKEHSNIMGIQQLETIKVTDKNGNEKRVFKAPMPNFRQVTKAFLENILISHKAKNKVVTKNKNKVAGSNKVQEVLTPRGQLHKETVYGKYQYYVQKEEKIGAKFDLETIKKVANPLYQSLLKKRLEENGGDPKKAFTGKNSLAKNPIYLDDTQTEQLPEKVKLVWLENSFSIRKDITPENFKDEKLIDKILDEGVKRILKERLQSFGNDAKKAFSDLDKNPIWLNKEKGITIKRVTISGVANAEPLHTKKDHLGKEILDKEGKPIPVDFISTGSNHHVAVYRDEKGNLQEKVVSVFEAVVRANQGLPIIDKTYNQHLGWEFLFTMKQNEMFVFPNESTGFNPNDIDLLDPKNKRIISPNLFRVQKFSKLQYGNSFVREFVFRHHLETTVEDRKELQGITYKQMKNSTFFNDIIKVRINHLGDIVSIGEY

SEQ ID NO: 312 - protein, 1281 aa, Bifidobacterium bifidum
MEDDSQHDIREIYLAIHHMVKYRGNFLVEGTLESSNAFKEDELLKLLGRITRYEMSEGEQNSDIEQDDENKLVAPANGQLADALCATRGSRSMRVDNALEALSAVNDLSREQRAIVKAIFAGLEGNKLDLAKIFVSKEFSSENKKILGIYFNKSDYEEKCVQIVDSGLLDDEEREFLDRMQGQYNAIALKQLLGRSTSVSDSKCASYDAHRANWNLIKLQLRTKENEKDINENYGILVGWKIDSGQRKSVRGESAYENMRKKANVFFKKMIETSDLSETDKNRLIHDIEEDKLFPIQRDSDNGVIPHQLHQNELKQIIKKQGKYYPFLLDAFEKDGKQINKIEGLLAFRVPYFVGPLVVPEDLQKSDNSENHWMVRKKKGEITPWNFDEMVDKDASGRKFIERLVGTDSYLLGEPTLPKNSLLYQEYEVLNELNNVRLSVRTGNHWNDKRRMRLGREEKTLLCQRLFMKGQTVTKRTAENLLRKEYGRTYELSGLSDESKFTSSLSTYGKMCRIFGEKYVNEHRDLMEKIVELQTVFEDKETLLHQLRQLEGISEADCALLVNTHYTGWGRLSRKLLTTKAGECKISDDFAPRKHSIIEIMRAEDRNLMEIITDKQLGFSDWIEQENLGAENGSSLMEVVDDLRVSPKVKRGIIQSIRLIDDISKAVGKRPSRIFLELADDIQPSGRTISRKSRLQDLYRNANLGKEFKGIADELNACSDKDLQDDRLFLYYTQLGKDMYTGEELDLDRLSSAYDIDHIIPQAVTQNDSIDNRVLVARAENARKTDSFTYMPQIADRMRNFWQILLDNGLISRVKFERLTRQNEFSEREKERFVQRSLVETRQIMKNVATLMRQRYGNSAAVIGLNAELTKEMHRYLGFSHKNRDINDYHHAQDALCVGIAGQFAANRGFFADGEVSDGAQNSYNQYLRDYLRGYREKLSAEDRKQGRAFGFIVGSMRSQDEQKRVNPRTGEVVWSEEDKDYLRKVMNYRKMLVTQKVGDDFGALYDETRYAATDPKGIKGIPFDGAKQDTSLYGGFSSAKPAYAVLIESKGKTRLVNVTMQEYSLLGDRPSDDELRKVLAKKKSEYAKANILLRHVPKMQLIRYGGGLMVIKSAGELNNAQQLWLPYEEYCYFDDLSQGKGSLEKDDLKKLLDSILGSVQCLYPWHRFTEEELADLHVAFDKLPEDEKKNVITGIVSALHADAKTANLSIVGMTGSWRRMNNKSGYTFSDEDEFIFQSPSGLFEKRVTVGELKRKAKKEVNSKYRTNEKRLPTLSGASQP

SEQ ID NO: 313 - protein, 1121 aa, Bifidobacterium dentium
MSVGLAAIEVDETGFPIRILNIQSVIHDGGIDPQLGKKKSISRKAISGVARRTRRMRRRKVVRLRQLDATLESLGFPIVEPDSLDTWEIWLTRAKLASSYIQDDETRKEDVSIALRHIARHRGWRNPYSNVESLFVDVAPSEQYEELRRKAEEKLGTSLSGNPTSAEIVECILKRQVGEVQLRTRSRKGVNGNAVEKEGLLPTKLMQSDNAAEIRRIFKVQRIDDETGRKLLRAVFKACSPKGSVERRVGRDALAPGLPRALKASLAFQEYRIANVLTNLVISEDGTKRKLTIAEKQRVFGFLSSNETDDITWIDVAEKLGLERRQIQGVGCLTADGEERISSTPPRNITALHIHSAKPVIREKLVAWWKAASPTVRETMVELLSNTVDIDRVREDMDYSSAVAFIDSLGDEELTALDSVDLLSGRAAYSRQTLKQLTERMLNTDDDLHEARKAVFGVDDNWKPPVDAISTSVGNPAVDRVLKIVNRYLLACQKRWRNPQSVQIEHVRESFSSVAKAKETERVQGERARYRNDLRRELCEQEGLNKIRESDIRRWESVQRQNGTCLYCGSPITFRTCEMDHIVPRKGVGSTNTRVNLAAACAACNKLKSNTAFSVWARTEGAANRKVSQRDAIERVKTFIFNKSVPPREQRAFKQAVISRLRQAESDPAIDNRSIESVAWMADELHRRIEAYFNQDADVSGNTPATQVWVFQGRVTALARKASGIEGRIHFAGEWKKTRLDRRHHAVDAAVIAMMNHSAAQTLVERDSLRLSQWITRKPETWKNYPFSEGQKKTRFKEWLDCMNALLDLLNDALDSDRVPVTRCQRMSLGNSQAHAATIRKMKRVELFSPMDADLIRRASTPALYCALTRLPEYSPEKGLPENRGREIVLNGRHIRSTETVDFFASGAAQLMVRNGSAEIGDSIHHMRIYRYRKTGAKSQEYVYGMIRVFQIDLLHASSENLFAVQLPSQSVSVRYGDKNVVQAIQEGRAEYLGHIVPNDEILISYEGVRMKDSEKIGAYANDFSGTASELAQRRHWVVVGSDVSKLALRPSYLSEEGLENSGSESERLSKQTRKVIEGKGWVVAVNILAKYHPVVIRRNALGEPRFRTNSGMPVSWRWDR

SEQ ID NO: 314 - protein, 354 aa, Bifidobacterium longum
AKQYVNSASIDDAEAETMKTTVSVFQGRVTASARRAAGIEGKIHFIGQQSKTRLDRRHHAVDASVIAMMNTAAAQTLMERESLRESQRLIGLMPGERSWKEYPYEGTSRYESFHLWLDNMDVLLELLNDALDNDRIAVMQSQRYVLGNSIAHDATIHPLEKVPLGSAMSADLIRRASTPALWCALTRLPDYDEKEGLPEDSHREIRVHDTRYSADDEMGFFASQAAQIAVQEGSADIGSAIHHARVYRCWKTNAKGVRKYFYGMIRVFQTDLLRACHDDLFTVPLPPQSISMRYGEPRVVQALQSGNAQYLGSLVVGDEIEMDFSSLDVDGQIGEYLQFFSQFSGGNLAWKHWV

SEQ ID NO: 315 - protein, 1124 aa, Bifidobacterium longum
LTGHSGHTFWPTSSSPPIQLEQEKRPLPQRNTSQNGHTFWPITRERCFMRGKRYRIGIDVGLNSVGLAAVEVSDENSPVRLLNAQSVIHDGGVDPQKNKEAITRKNMSGVARRTRRMRRRKRERLHKLDMLLGKFGYPVIEPESLDKPFEEWHVRAELATRYIEDDELRRESISIALRHMARHRGWRNPYRQVDSLISDNPYSKQYGELKEKAKAYNDDATAAEEESTPAQLVVAMLDAGYAEAPRLRWRTGSKKPDAEGYLPVRLMQEDNANELKQIFRVQRVPADEWKPLFRSVFYAVSPKGSAEQRVGQDPLAPEQARALKASLAFQEYRIANVITNLRIKDASAELRKLTVDEKQSIYDQLVSPSSEDITWSDLCDFLGFKRSQLKGVGSLTEDGEERISSRPPRLTSVQRIYESDNKIRKPLVAWWKSASDNEHEAMIRLLSNTVDIDKVREDVAYASAIEFIDGLDDDALTKLDSVDLPSGRAAYSVETLQKLTRQMLTTDDDLHEARKTLFNVTDSWRPPADPIGEPLGNPSVDRVLKNVNRYLMNCQQRWGNPVSVNIEHVRSSFSSVAFARKDKREYEKNNEKRSIFRSSLSEQLRADEQMEKVRESDLRRLEAIQRQNGQCLYCGRTITFRTCEMDHIVPRKGVGSTNTRTNFAAVCAECNRMKSNTPFAIWARSEDAQTRGVSLAEAKKRVTMFTFNPKSYAPREVKAFKQAVIARLQQTEDDAAIDNRSIESVAWMADELHRRIDWYFNAKQYVNSASIDDAEAETMKTTVSVFQGRVTASARRAAGIEGKIHFIGQQSKTRLDRRHHAVDASVIAMMNTAAAQTLMERESLRESQRLIGLMPGERSWKEYPYEGTSRYESFHLWLDNMDVLLELLNDALDNDRIAVMQSQRYVLGNSIAHDATIHPLEKVPLGSAMSADLIRRASTPALWCALTRLPDYDEKEGLPEDSHREIRVHDTRYSADDEMGFFASQAAQIAVQEGSADIGSAIHHARVYRCWKTNAKGVRKYFYGMIRVFQTDLLRACHDDLFTVPLPPQSISMRYGEPRVVQALQSGNAQYLGSLVVGDEIEMDFPVSMLMVRLASIYNSSRSLVEGTLHGNIGLLMDSLTRRS

SEQ ID NO: 316 - protein, 166 aa, Bifidobacterium longum
MGLAAVEVSDENSPVRLLNAQSVIHDGGVDPQKNKEAITRKNMSGVARRTRRMRRRKRERLHKLDMLLGKFGYPVIEPESLDKPFEEWHVRAELATRYIEDDELRRESISIALRHMARHRGWRNPYRQVDSLISDNPYSKQYGELKEKAKAYNDDATAAEEESTPA

SEQ ID NO: 317 - protein, 1138 aa, Bifidobacterium longum
MNSVGLAAVEVSDENSPVRLLNAQSVIHDGGVDPQKNKEAITRKNMSGVARRTRRMRRRKRERLHKLDMLLGKFGYPVIEPESLDKPFEEWHVRAELATRYIEDDELRRESISIALRHMARHRGWRNPYRQVDSLISDNPYSKQYGELKEKAKAYNDDATAAEEESTPAQLVVAMLDAGYAEAPRLRWRTGSKKPDAEGYLPVRLMQEDNANELKQIFRVQRVPADEWKPLFRSVFYAVSPKGSAEQRVGQDPLAPEQARALKASLAFQEYRIANVITNLRIKDASAELRKLTVDEKQSIYDQLVSPSSEDITWSDLCDFLGFKRSQLKGVGSLTEDGEERISSRPPRLTSVQRIYESDNKIRKPLVAWWKSASDNEHEAMIRLLSNTVDIDKVREDVAYASAIEFIDGLDDDALTKLDSVDLPSGRAAYSVETLQKLTRQMLTTDDDLHEARKTLFNVTDSWRPPADPIGEPLGNPSVDRVLKNVNRYLMNCQQRWGNPVSVNIEHVRSSFSSVAFARKDKREYEKNNEKRSIFRSSLSEQLRADEQMEKVRESDLRRLEAIQRQNGQCLYCGRTITFRTCEMDHIVPRKGVGSTNTRTNFAAVCAECNRMKSNTPFAIWARSEDAQTRGVSLAEAKKRVTMFTFNPKSYAPREVKAFKQAVIARLQQTEDDAAIDNRSIESVAWMADELHRRIDWYFNAKQYVNSASIDDAEAETMKTTVSVFQGRVTASARRAAGIEGKIHFIGQQSKTRLDRRHHAVDASVIAMMNTAAAQTLMERESLRESQRLIGLMPGERSWKEYPYEGTSRYESFHLWLDNMDVLLELLNDALDNDRIAVMQSQRYVLGNSIAHDATIHPLEKVPLGSAMSADLIRRASTPALWCALTRLPDYDEKEGLPEDSHREIRVHDTRYSADDEMGFFASQAAQIAVQEGSADIGSAIHHARVYRCWKTNAKGVRKYFYGMIRVFQTDLLRACHDDLFTVPLPPQSISMRYGEPRVVQALQSGNAQYLGSLVVGDEIEMDFSSLDVDGQIGEYLQFFSQFSGGNLAWKHWVVDGFFNQTQLRIRPRYLAAEGLAKAFSDDVVPDGVQKIVTKQGWLPPVNTASKTAVRIVRRNAFGEPRLSSAHHMPCSWQWRHE

SEQ ID NO: 318 - protein, 182 aa, Bifidobacterium longum
MRGKRYRIGIDVGLNSVGLAAVEVSDENSPVRLLNAQSVIHDGGVDPQKNKEAITRKNMSGVARRTRRMRRRKRERLHKLDMLLGKFGYPVIEPESLDKPFEEWHVRAELATRYIEDDELRRESISIALRHMARHRGWRNPYRQVDSLISDNPYSKQYGELKEKAKAYNDDATAAEEESTPA

SEQ ID NO: 319 - protein, 441 aa, Bifidobacterium longum
MVAMLDAGYAEAPRLRWRTGSKKPDAEGYLPVRLMQEDNANELKQIFRVQRVPADEWKPLFRSVFYAVSPKGSAEQRVGQDPLAPEQARALKASLAFQEYRIANVITNLRIKDASAELRKLTVDEKQSIYDQLVSPSSEDITWSDLCDFLGFKRSQLKGVGSLTEDGEERISSRPPRLTSVQRIYESDNKIRKPLVAWWKSASDNEHEAMIRLLSNTVDIDKVREDVAYASAIEFIDGLDDDALTKLDSVDLPSGRAAYSVETLQKLTRQMLTTDDDLHEARKTLFNVTDSWRPPADPIGEPLGNPSVDRVLKNVNRYLMNCQQRWGNPVSVNIEHVRSSFSSVAFARKDKREYEKNNEKRSIFRSSLSEQLRADEQMEKVRESDLRRLEAIQRQNGQCLYCGRTITFRTCEMDHIVPRKGVGSTNTRTNFAAVCAECNRM

SEQ ID NO: 320 - protein, 967 aa, Bifidobacterium longum
MVAMLDAGYAEAPRLRWRTGSKKPDAEGYLPVRLMQEDNANELKQIFRVQRVPADEWKPLFRSVFYAVSPKGSAEQRVGQDPLAPEQARALKASLAFQEYRIANVITNLRIKDASAELRKLTVDEKQSIYDQLVSPSSEDITWSDLCDFLGFKRSQLKGVGSLTEDGEERISSRPPRLTSVQRIYESDNKIRKPLVAWWKSASDNEHEAMIRLLSNTVDIDKVREDVAYASAIEFIDGLDDDALTKLDSVDLPSGRAAYSVETLQKLTRQMLTTDDDLHEARKTLFNVTDSWRPPADPIGEPLGNPSVDRVLKNVNRYLMNCQQRWGNPVSVNIEHVRSSFSSVAFARKDKREYEKNNEKRSIFRSSLSEQLRADEQMEKVRESDLRRLEAIQRQNGQCLYCGRTITFRTCEMDHIVPRKGVGSTNTRTNFAAVCAECNRMKSNTPFAIWARSEDAQTRGVSLAEAKKRVTMFTFNPKSYAPREVKAFKQAVIARLQQTEDDAAIDNRSIESVAWMADELHRRIDWYFNAKQYVNSASIDDAEAETMKTTVSVFQGRVTASARRAAGIEGKIHFIGQQSKTRLDRRHHAVDASVIAMMNTAAAQTLMERESLRESQRLIGLMPGERSWKEYPYEGTSRYESFHLWLDNMDVLLELLNDALDNDRIAVMQSQRYVLGNSIAHDATIHPLEKVPLGSAMSADLIRRASTPALWCALTRLPDYDEKEGLPEDSHREIRVHDTRYSADDEMGFFASQAAQIAVQEGSADIGSAIHHARVYRCWKTNAKGVRKYFYGMIRVFQTDLLRACHDDLFTVPLPPQSISMRYGEPRVVQALQSGNAQYLGSLVVGDEIEMDFSSLDVDGQIGEYLQFFSQFSGGNLAWKHWVVDGFFNQTQLRIRPRYLAAEGLAKAFSDDVVPDGVQKIVTKQGWLPPVNTASKTAVRIVRRNAFGEPRLSSAHHMPCSWQWRHE

SEQ ID NO: 321 - protein, 1151 aa, Bifidobacterium sp.
MRGKRYRIGIDVGLNSVGLAAVEVSDENSPVRLLNAQSVIHDGGVDPQKNKEAITRKNMSGVARRTRRMRRRKRERLHKLDMLLGKFGYPVIEPESLDKPFEEWHVRAELATRYIEDDELRRESISIALRHMARHRGWRNPYRQVDSLISDNPYSKQYGELKEKAKAYNDDATAAEEESTPAQLVVAMLDAGYAEAPRLRWRTGSKKPDAEGYLPVRLMQEDNANELKQIFRVQRVPADEWKPLFRSVFYAVSPKGSAEQRVGQDPLAPEQARALKASLAFQEYRIANVITNLRIKDASAELRKLTVDEKQSIYDQLVSPSSEDITWSDLCDFLGFKRSQLKGVGSLTEDGEERISSRPPRLTSVQRIYESDNKIRKPLVAWWKSASDNEHEAMIRLLSNTVDIDKVREDVAYASAIEFIDGLDDDALTKLDSVDLPSGRAAYSVETLQKLTRQMLTTDDDLHEARKTLFNVTDSWRPPADPIGEPLGNPSVDRVLKNVNRYLMNCQQRWGNPVSVNIEHVRSSFSSVAFARKDKREYEKNNEKRSIFRSSLSEQLRADEQMEKVRESDLRRLEAIQRQNGQCLYCGRTITFRTCEMDHIVPRKGVGSTNTRTNFAAVCAECNRMKSNTPFAIWARSEDAQTRGVSLAEAKKRVTMFTFNPKSYAPREVKAFKQAVIARLQQTEDDAAIDNRSIESVAWMADELHRRIDWYFNAKQYVNSASIDDAEAETMKTTVSVFQGRVTASARRAAGIEGKIHFIGQQSKTRLDRRHHAVDASVIAMMNTAAAQTLMERESLRESQRLIGLMPGERSWKEYPYEGTSRYESFHLWLDNMDVLLELLNDALDNDRIAVMQSQRYVLGNSIAHDATIHPLEKVPLGSAMSADLIRRASTPALWCALTRLPDYDEKEGLPEDSHREIRVHDTRYSADDEMGFFASQAAQIAVQEGSADIGSAIHHARVYRCWKTNAKGVRKYFYGMIRVFQTDLLRACHDDLFTVPLPPQSISMRYGEPRVVQALQSGNAQYLGSLVVGDEIEMDFSSLDVDGQIGEYLQFFSQFSGGNLAWKHWVVDGFFNQTQLRIRPRYLAAEGLAKAFSDDVVPDGVQKIVTKQGWLPPVNTASKTAVRIVRRNAFGEPRLSSAHHMPCSWQWRHE

SEQ ID NO: 322 - protein, 1092 aa, Brevibacillus laterosporus
MAYTMGIDVGIASCGWAIVDLERQRIIDIGVRTFEKAENPKNGEALAVPRREARSSRRRLRRKKHRIERLKYMFVRNGLAVDIQHLEQTLRSQNEIDVWQLRVDGLDRMLTQKEWLRVLIHLAQRRGFQSNRKTDGSSEDGQVLVNVTENDRLMEEKDYRTVAEMMVKDEKFSDHKRNKNGNYHGVVSRASLLVEIHTLFESQRQHHNFLASKDFELEYINIWSSQRPVATKDQIEKMIGTCTFLPKEKRAPKASWHFQYFMLLQTINHIRITNAQGTRPLNKEEIEQVVNMALTKSKVSYHDIRKVLDLSEEYQFVGLDYGKEDEKKKVESKETIIKLDDYHKLNKIFNEVELAKGETWEAVDYDTVAYALTFFKDDEDIRDYLQNKYKDSKNRLVKNVANKEYTNELIEKVSTLSFRKVGHLSLKALRKIIPFLEQGMTYDKACQAAGFNFQGISKKKRSVVLPVIDQISNPVVNRALTQTRKVINALIKKYGSPETIHIETARELSKRFDERKNITKDYKENRDKNERAKKHLSELGIINPTGLDIVKYKLWCEQQGRCMYSNQPISFERLRESGYTEVDHIIPYSRSMNDSYNNRVLVMTRENREKSNQTPYEYMGNDTQRWDEFEQRVTTNPQIKKEKRQNLLLKGFTNRRELEMLERNLNDTRHITKYLSHFISTNLEFSPSDKKKKVVNTSGRITSHLRSRWGLEKNREQNDLHHAMDAVVIAVTSDSFIQQVTNYYKRKERRELNGDDKFPLPWKFFREEVIARLSPNPKEQIEALPNHFYSEDELADLQPIFVSRMPKRSITGEAHQAQFRRVVGKTKEGKNITAKKTALVDISYDKNGDFNMYGRETDPATYEAIKERYLEFGGNAKKAFSTDLHKPKKDGTKGPLIKSVRIMENKTLVHPVNKGKGVVYNSSIVRTDVFQRKEKYYLLPVYVTDVTKGKLPNKVIAAKKGYDDWIEVDDSFTFLYSLYPNDLIFIRQNPKKKISLKKRIESHSISDSKEVQEILTYYKGVDSSTAAIEFITHDGSYYAKGVGVQNLDCFEKYQVDILGNYSKVKGEKRLELETSDNNHKGKDVNSIKSTSR

SEQ ID NO: 323 - protein, 103 aa, Butyrivibrio fibrisolvens
MISVGQSRKDLEDLGYEFKLSFYKEDIIEYEKNGDILVERFLSRTMPQVRNYIETKPIDRPKYDKRNPVGLSKTSSIRKITMDILGNRFYVDKMSFNNVVGTQ

SEQ ID NO: 324 - protein, 177 aa, Butyrivibrio fibrisolvens
MLIAFSQMGYDAYHELTNKYIDFETGEIIDKEGFNELLNNDLVYKNTMYESKWLKIKGNIEKAAEKNKYWYQVNKKCNRGLCNQTVYGTRESDGDVYKISKIDIRTDDGFKKFKNIVDKGNESVFLMYENDPKTFELIMDIYKNYSDSKNPFVQYEKETGDIIRKYSKKITGQRFLN

SEQ ID NO: 325 - protein, 1442 aa, Caenispirillum salinarum
MPVLSPLSPNAAQGRRRWSLALDIGEGSIGWAVAEVDAEGRVLQLTGTGVTLFPSAWSNENGTYVAHGAADRAVRGQQQRHDSRRRRLAGLARLCAPVLERSPEDLKDLTRTPPKADPRAIFFLRADAARRPLDGPELFRVLHHMAAHRGIRLAELQEVDPPPESDADDAAPAATEDEDGTRRAAADERAFRRLMAEHMHRHGTQPTCGEIMAGRLRETPAGAQPVTRARDGLRVGGGVAVPTRALIEQEFDAIRAIQAPRHPDLPWDSLRRLVLDQAPIAVPPATPCLFLEELRRRGETFQGRTITREAIDRGLTVDPLIQALRIRETVGNLRLHERITEPDGRQRYVPRAMPELGLSHGELTAPERDTLVRALMHDPDGLAAKDGRIPYTRLRKLIGYDNSPVCFAQERDTSGGGITVNPTDPLMARWIDGWVDLPLKARSLYVRDVVARGADSAALARLLAEGAHGVPPVAAAAVPAATAAILESDIMQPGRYSVCPWAAEAILDAWANAPTEGFYDVTRGLFGFAPGEIVLEDLRRARGALLAHLPRTMAAARTPNRAAQQRGPLPAYESVIPSQLITSLRRAHKGRAADWSAADPEERNPFLRTWTGNAATDHILNQVRKTANEVITKYGNRRGWDPLPSRITVELAREAKHGVIRRNEIAKENRENEGRRKKESAALDTFCQDNTVSWQAGGLPKERAALRLRLAQRQEFFCPYCAERPKLRATDLFSPAETEIDHVIERRMGGDGPDNLVLAHKDCNNAKGKKTPHEHAGDLLDSPALAALWQGWRKENADRLKGKGHKARTPREDKDFMDRVGWRFEEDARAKAEENQERRGRRMLHDTARATRLARLYLAAAVMPEDPAEIGAPPVETPPSPEDPTGYTAIYRTISRVQPVNGSVTHMLRQRLLQRDKNRDYQTHHAEDACLLLLAGPAVVQAFNTEAAQHGADAPDDRPVDLMPTSDAYHQQRRARALGRVPLATVDAALADIVMPESDRQDPETGRVHWRLTRAGRGLKRRIDDLTRNCVILSRPRRPSETGTPGALHNATHYGRREITVDGRTDTVVTQRMNARDLVALLDNAKIVPAARLDAAAPGDTILKEICTEIADRHDRVVDPEGTHARRWISARLAALVPAHAEAVARDIAELADLDALADADRTPEQEARRSALRQSPYLGRAISAKKADGRARAREQEILTRALLDPHWGPRGLRHLIMREARAPSLVRIRANKTDAFGRPVPDAAVWVKTDGNAVSQLWRLTSVVTDDGRRIPLPKPIEKRIEISNLEYARLNGLDEGAGVTGNNAPPRPLRQDIDRLTPLWRDHGTAPGGYLGTAVGELEDKARSALRGKAMRQTLTDAGITAEAGWRLDSEGAVCDLEVAKGDTVKKDGKTYKVGVITQGIFGMPVDAAGSAPRTPEDCEKFEEQYGIKPWKAKGIPLA

SEQ ID NO: 326 - protein, 984 aa, Campylobacter coli
MARILAFDIGISSIGWAFSENDELKDCGVRIFTKAENPKTGESLALPRRLARSARKCLARRKARLNHLKHLIANEFKLNYEDYQSFDESLAKAYKGSLISPYELRFRALNELLSKQDFARVILHIAKRRGYDDIKNNGDEEKSEILKAIKQNEEKLVNYQSVGEYLYKEYFQKFKENSKEFINVRNKKESYERCIAQSFLKDELKLIFQKQREFGFSFSKKFEEEVLSVAFYKRALKDFSHLVGNCSFFTDEKRAPKNSPLAFMFVALTRIINLLNNLKNTEGILYTKDDLNALLNEVLKNGTLTYKQTKKLLGLSDDYEFKGEKGTYFIEFKKYKEFIKALGEHNLSQDDLNEIAKDITLIKDEIKLKKALAKYDLNQNQIDSLSKLEFKDHLNISFKALKLITPLMLEGKKYDEACNELNLKVAINEDKKDFLPAFNETYYKDEVTNPVVLRAIKEYRKVLNALLKKYGKVHKINIELAREVGKNHSQRAKIEKEQNENYKAKKDAELECEKLGLKINSKNILKLRLFKEQKEFCAYSGEKIKISDLQDEKMLEIDHIYPYSRSFDDSYMNKVLVFTKQNQEKLNQTPFEAFGNDSAKWQKIEVLAKNLPTKKQKRILDKNYKDKEQKNFKDRNLNDTRYIARLVLNYTKDYLDFLPLSDDENTKLNDTQKGSKVHVEAKSGMLTSALRHTWGFSAKDRNNHLHHAIDAVIIAYANNSIVKAFSDFKKEQESNSAELYAKKISELDYKNKRKFFEPFSGFRQKVLDKIDEIFVSKPERKKPSGALHEETFRKEEEFYQSYGGKEGVLKALELGKIRKVNGKIVKNGDMFRVDIFKHKKTNKFYAVPIYTMDFALKVLPNKAVARSKKGEIKDWILMDENYEFCFSLYKDSLILIQTKDMQEPEFVYYNAFTSSTVSLIVSKHDNKFETLSKNQKILFKNANEKEVIAKSIGIQNLKVFEKYIVSALGEVTKAEFRQREDFKK

SEQ ID NO: 327 - protein, 984 aa, Campylobacter coli
MARILAFDIGISSIGWAFSENDELKDCGVRIFTKAENPKTGESLALPRRLARSARKRLARRKARLNHLKHLIANEFKLNYEDYQSFDESLAKAYKGSLISPYELRFRALNELLSKQDFARVILHIAKRRGYDDIKNNGDEEKGKILKAIKQNEEKLVNYQSVGEYLYKEYFQKFKENSKEFINVRNKKESYERCITQSFLKYELKLIFQKQREFGFSFSKKFEEEVLSVAFYKRALKDFSHLVGNCSFFSDEKRAPKNSPLAFMFVALTRIINLLNNLKNTEGILYTKDDLNALLNEVLKNGTLTYKQTKKLLGLSDDYEFKGEKGTYFIEFKKYKEFIKALGEHNLSQDDLNEIAKDITLIKDEIKLKKALAKYDLNQNQIDSLSKLEFKDHLNISFKALKLITPLMLEGKKYDEACNELNLKVAINEDKKDFLPAFNETYYKDEVTNPVVLRAIKEYRKVLNALLKKYGKVHKINIELAREVGKNYSQRAKIEKEQNENYKAKKDAELECEKLGLKINSKNILKLRLFKEQKEFCAYSGEKIKISDLQDEKMLEIDHIYPYSRSFDDSYMNKVLVFTKQNQEKLNQTPFEAFGNDSAKWQKIEVLAKNLPTKKQKRILDKNYKDKEQKNFKDRNLNDTRYIARLVLNYTKDYLDFLPLSDDENTKLNDTQKGSKVHVEAKSGMLTSALRHTWGFSAKDRNNHLHHAIDAVIIAYANNSIVKAFSDFKKEQESNSAELYAKKISELDYKNKRKFFEPFSGFRQKVLDKIDEIFVSKPERKKPSGALHEETFRKEEEFYQSYGGKEGVLKALELGKIRKVNGKIVKNGDMFRVDIFKHKKTNKFYAVPIYTMDFALKVLPNKAVARSKKGEIKDWILMDENYEFCFSLYKDSLILIQTKDMQEPEFVYYNAFTSSTVSLIVSKHDNKFETLSKNQKILFKNANEKEVIAKSIGIQNLKVFEKYIVSALGEVTKAEFRQREDFKK

SEQ ID NO: 328 - protein, 984 aa, Campylobacter coli
MARILAFDIGISSIGWAFSENDELKDCGVRIFTKAENPKTGESLALPRRLARSARKRLARRKARLNHLKHLIANEFKLNYEDYQSFDESLAKAYKGSLISPYELRFRALNELLSKQDFARVILHIAKRRGYDDIKNNGDEEKSEILKAIKQNEEKLVNYQSVGEYLYKEYFQKFKENSKEFINVRNKKESYERCIAQSFLKDELKLIFQKQREFGFSFSKKFEEEVLSVAFYKRALKDFSHLVGNCSFFTDEKRAPKNSPLAFMFVALTRIINLLNNLKNTEGILYTKDDLNTLLNEVLKNGTLTYKQTKKLLGLSDDYEFKGEKGTYFIEFKKYKEFIKALGEHNLSQDNLNEIAKDITLIKDEIKLKKALAKYDLNQNQIDSLSKLEFKDHLNISFKALKLITPLMLEGKKYDEAYNELNLKVAINEDKKDFLPAFNETYYKDEVTNPVVLRAIKEYRKVLNALLKKYGKVHKINIELAREVGKNHSQRAKIEKEQNENYKAKKDAELECEKLGLKINSKNILKLRLFKEQKEFCAYSGEKIKISDLQDEKMLEIDHIYPYSRSFDDSYMNKVLVFTKQNQEKLNQTPFEAFGNDSAKWQKIEVLAKNLPTKKQKRILDKNYKDKEQKDFKDRNLNDTRYIARLVLNYTKDYLDFLPLSDDENTKLNDTQKGSKVHVEAKSGMLTSALRHTWGFSAKDRNNHLHHAIDAVIIAYANNSIVKAFSDFKKEQESNSAELYAKKISELDYKNKRKFFEPFSGFRQKVLDKIDEIFVSKPERKKPSGALHEETFRKEEEFYQSYGGKEGVLKALELGKIRKVNGKIVKNGDMFRVDIFKHKKTNKFYAVPIYTMDFALKVLPNKAVARSKKGEIKDWILMDENYEFCFSLYKDSLILIQTKDMQEPELVYFNAFTSSTVSLIVSKHDNKFETLSKNQKILFKNANEKEVIAKSIGIQNLKVFEKYIVSALGEVTKAEFRQREDFKK

SEQ ID NO: 329 - protein, 984 aa, Campylobacter coli
MARILAFDIGISSIGWAFSENDELKDCGVRIFTKAENPKTGESLALPRRLARSARKRLARRKARLNHLKHLIANEFKLNYEDYQSFDESLAKAYKGSLISPYELRFRALNELLSKQDFARVILHIAKRRGYDDIKNNGDEEKSEILKAIKQNEEKLVNYQSVGEYLYKEYFQKFKENSKEFINVRNKKESYERCIAQSFLKDELKLIFQKQREFGFSFSKKFEEEVLSVAFYKRALKDFSHLVGNCSFFTDEKRAPKNSPLAFMFVALTRIINLLNNLKNTEGILYTKDDLNALLNEVLKNGTLTYKQTKKLLGLSDDYEFKGEKGTYFIEFKKYKEFIKALGEHNLSQDDLNEIAKDITLIKDEIKLKKALAKYDLNQNQIDSLSKLEFKDHLNISFKALKLITPLMLEGKKYDEACNELNLKVAINEDKKDFLPAFNETYYKDEVTNPVVLRAIKEYRKVLNALLKKYGKVHKINIELAREVGKNYSQRAKIEKEQNENYKAKKDAELECEKLGLKINSKNILKLRLFKEQKEFCAYSGEKIKISDLQDEKMLEIDHIYPYSRSFDDSYMNKVLVFTKQNQEKLNQTPFEAFGNDSAKWQKIEVLAKNLPTKKQKRILDKNYKDKEQKNFKDRNLNDTRYIARLVLNYTKDYLDFLPLSDDENTKLNDTQKGSKVHVEAKSGMLTSALRHTWGFSAKDRNNHLHHAIDAVIIAYANNSIVKAFSDFKKEQESNSAELYAKKISELDYKNKRKFFEPFSGFRQKVLDKIDEIFVSKPERKKPSGALHEETFRKEEEFYQSYGGKEGVLKALELGKIRKVNGKIVKNGDMFRVDIFKHKKTNKFYAVPIYTMDFALKVLPNKAVARSKKGEIKDWILMDENYEFCFSLYKDSLILIQTKDMQEPEFVYYNAFTSSTVSLIVSKHDNKFETLSKNQKILFKNANEKEVIAKSIGIQNLKVFEKYIVSALGEVTKAEFRQREDFKK

SEQ ID NO: 330 - protein, 987 aa, Campylobacter coli
MARILAFDIGISSIGWAFSENDELKDCGVRIFTKAENPKTGESLALPRRLARSARKRLARRKARLNHLKHLIANEFKLNYEDYQSFDESLAKAYKGSLISPYELRFRALNELLSKQDFARVILHIAKRRGYDDIKNNGDEEKSEILKAIKQNEEKLVNYQSVGEYLYKEYFQKFKENSKEFINVRNKKESYERCIAQSFLKDELKLIFQKQREFGFSFSKKFEEEVLSVAFYKRALKDFSHLVGNCSFFTDEKRAPKNSPLAFMFVALTRIINLLNNLKNTEGILYTKDDLNTLLNEVLKNGTLTYKQTKKLLGLSDDYEFKGEKGTYFIEFKKYKEFIKALGEHNLSQDNLNEIAKDITLIKDEIKLKKALAKYDLNQNQIDSLSKLEFKDHLNISFKALKLITPLMLEGKKYDEAYNELNLKVAINEDKKDFLPAFNETYYKDEVTNPVVLRAIKEYRKVLNALLKKYGKVHKINIELAREVGKNHSQRAKIEKEQNENYKAKKDAELECEKLGLKINSKNILKLRLFKEQKEFCAYSGEKIKISDLQDEKMLEIDHIYPYSRSFDDSYMNKVLVFTKQNQEKLNQTPFEAFGNDSAKWQKIEVLAKNLPTKKQKRILDKNYKDKEQKDFKDRNLNDTRYIARLVLNYTKDYLDFLPLSDDENTKLNDTQKGSKVHVEAKSGMLTSALRHTWGFSAKDRNNHLHHAIDAVIIAYANNSIVKAFSDFKKEQESNSAELYAKKISELDYKNKRKFFEPFSGFRQKVLDKIDEIFVSKPERKKPSGALHEETFRKEEEFYQSYGGKEGVLKALELGKIRKVNGKIVKNGDMFRVDIFKHKKTNKFYAVPIYTMDFALKVLPNKAVARSKKGEIKDWILMDENYEFCFSLYKDSLILIQTKDMQEPELVYFNAFTSSTVSLIVSKHDNKFETLSKNQKILFKNANEKEVIAKSIGIQNLKVFEKYIVSALGEVTKAEFRQREDFKNELR

SEQ ID NO: 331 - protein, 984 aa, Campylobacter coli
MARILAFDIGISSIGWAFSENDELKDCGVRIFTKAENPKTGESLALPRRLARSARKRLARRKARLNHLKHLIANEFKLNYEDYQSFDESLAKAYKGSLISPYELRFRALNELLSKQDFARVILHIAKRRGYDDIKNNGDEEKSEILKAIKQNEEKLVNYQSVGEYLYKEYFQKFKENSKEFINVRNKKESYERCIAQSFLKDELKLIFQKQREFGFSFSKKFEEEVLSVAFYKRALKDFSHLVGNCSFFTDEKRAPKNSPLAFMFVALTRIINLLNNLKNTEGILYTKDDLNTLLNEVLKNGTLTYKQTKKLLGLSDDYEFKGEKGTYFIEFKKYKEFIKALGEHNLSQDNLNEIAKDITLIKDEIKLKKALAKYDLNQNQIDSLSKLEFKDHLNISFKALKLITPLMLEGKKYDEAYNELNLKVAINEDKKDFLPAFNETYYKDEVTNPVVLRAIKEYRKVLNALLKKYGKVHKINIELAREVGKNHSQRAKIEKEQNENYKAKKDAELECEKLGLKINSKNILKLRLFKEQKEFCAYSGEKIKISDLQDEKMLEIDHIYPYSRSFDDSYMNKVLVFTKQNQEKLNQTPFEAFGNDSAKWQKIEVLAKNLPTKKQKRILDKNYKDKEQKDFKDRNLNDTRYIARLVLNYTKDYLDFLPLSNDENTKLNDTQKGSKVHVEAKSGMLTSALRHTWGFSAKDRNNHLHHAIDAVIIAYANNSIVKAFSDFKKEQESNSAELYAKKISELDYKNKRKFFEPFSGFRQKVLDKIDEIFVSKPERKKPSGALHEETFRKEEEFYQSYGGKEGVLKALELGKIRKVNGKIVKNGDMFRVDIFKHKKTNKFYAVPIYTMDFALKVLPNKAVARSKKGEIKDWILMDENYEFCFSLYKDSLILIQTKDMQEPELVYFNAFTSSTVSLIVSKHDNKFETLSKNQKILFKNANEKEVIAKSIGIQNLKVFEKYIVSALGEVTKAEFRQREDFKK

SEQ ID NO: 332 - protein, 987 aa, Campylobacter coli
MARILAFDIGISSIGWAFSENDELKDCGVRIFTKAENPKTGESLALPRRLARSARKRLARRKARLNHLKHLIANEFKLNYEDYQSFDESLAKAYKGSLISPYELRFRALNELLSKQDFARVILHIAKRRGYDDIKNSDDKEKGAILKAIKQNEEKLANYQSVGEYLYKEYFQKFKENSKEFTNVRNKKESYERCIAQSFLKDELKLIFKKQREFGFSFSKKFEEEVLSVAFYKRALKDFSHLVGNCSFFTDEKRAPKNSPLAFMFVALTRIINLLNNLKNTEGILYTKDDLNALLNEVLKNGTLTYKQTKKLLGLSDDYEFKGEKGTYFIEFKKYKEFIKALGDHSLSQDDLNEIAKDITLIKDEIKLKKALAKYDLNQNQIDSLSKLEFKDHLNISFKALKLITPLMLEGKKYDEACNELNLKVAINEDKKDFLPAFNETYYKDEVTNPVVLRAIKEYRKVLNALLKKYGKVHKINIELAREVGKNYSQRAKIEKEQNENYKAKKDAELECEKLGLKINSKNILKLRLFKEQKEFCAYSGEKIKISDLQDEKMLEIDHIYPYSRSFDDSYMNKVLVFTKQNQEKLNKTPFEAFGNDSTKWQKIEVLAKNLPEKKQKRILDKNYKDKEQKDFKDRNLNDTRYIARLVLNYTKDYLDFLPLSDDENTKLNDTQKGSKVHVEAKSGMLTSALRHTWGFSTKDRNNHLHHAIDAVIIAYANNSIVKAFSDFKKEQESNSAELYAKKISELDYKNKRKFFEPFSGFRQKVLDKIDEIFVSKPERKKPSGALHEETFRKEEEFYQSYGGKEGVLKALELGKIRKVNGKIVKNGDMFRVDIFKHKKTNKFYAVPIYTMDFALKVLPNKAVARSKKGEIKDWILMDENYEFCFSLYKDSLILIQTKDMQEPEFVYYNAFTSSTVSLIVSKHDNKFETLSKNQKILFKNANEKEVIAKSIGIQNLKVFEKYIVSALGEVTKAEFRQREDFKNELR

SEQ ID NO: 333 - protein, 984 aa, Campylobacter coli
MARILAFDIGISSIGWAFSENDELKDCGVRIFTKAENPKTGESLALPRRLARSARKRLARRKARLNHLKHLIANEFKLNYEDYQSFDESLAKAYKGSLISPYELRFRALNELLSKQDFARVILHIAKRRGYDDIKNSDDKEKGAILKAIKQNEEKLTNYQSVGEYLYKEYFQKFKENSKEFTNVRNKKESYERCIAQSFLKDELKLIFKKQREFGFSFSKKFEEEVLSVAFYKRALKDFSHLVGNCSFFTDEKRAPKNSPLAFMFVALTRIINLLNNLKNTEGILYTKDDLNALLNEVLKNGTLTYKQTKKLLGLSDDYEFKGEKGTYFIEFKKYKEFIKALGDHSLSQDDLNEIAKDITLIKDEIKLKKALAKYDLNQNQIDSLSKLEFKDHLNISFKALKLITPLMLEGKKYDEACNELNLKVAINEDKKDFLPAFNETYYKDEVTNPVVLRAIKEYRKVLNALLKKYGKVHKINIELAREVGKNYSQRAKIEKEQNENYKAKKDAELECEKLGLKINSKNILKLRLFKEQKEFCAYSGEKIKISDLQDEKMLEIDHIYPYSRSFDDSYMNKVLVFTKQNQEKLNQTPFEAFGNDSAKWQKIEVLAKNLPTKKQKRILDKNYKDKEQKDFKDRNLNDTRYIARLVLNYTKDYLDFLPLSDDENTKLNDTQKGSKVHVEAKSGMLTSALRHTWGFSAKDRNNHLHHAIDAVIIAYANNSIVKAFSDFKKEQESNSAELYAKKISELDYKNKRKFFEPFSGFRQKVLDKIDEIFVSKPERKKPSGALHEETFRKEEEFYQSYGGKEGVLKALELGKIRKVNGKIVKNGDMFRVDIFKHKKTNKFYAVPIYTMDFALKVLPNKAVARSKKGEIKDWILMDENYEFCFSLYKDSLILIQTKDMQEPEFVYYNAFTSSTVSLIVSKHDNKFETLSKNQKILFKNANEKEVIAKSIGIQNLKVFEKYIVSALGEVTKAEFRQREDFKK

SEQ ID NO: 334 - protein, 965 aa, Campylobacter coli
MKIIGFNLGIANIGWALRENDEIIDCGVRVFDIPENPKNGNSLALERRENKARMKIVKRKKARMLATKTFLKKELNVDLSKLFLIGSTQSIYELRTKALSSLISKEELSAIILHIAKHRGYDDSALKNENGTIIEALNKNKEAMLKFKSVGEYFYKNFVQNKEVKKIRNTTEDYSNSVPRSLLKQELDLILDKQKELGLIKNADFKAKLFEIIFFKRPLKDFSNKIGNCIFFENEKRAAKNTISACEFVALGKVVNLLKSIEKDIGIVYEKDSINEIMSIILDKTSISYKKIRDILNLPQDINFKGLDYSKNNVENSKLVDLKKLNEFKKALGDGFTNLDKDILDSIATDITLTKDTATLKEKLKNYNVLNAEQIEKLSELVFNDHINLSLKALKQIIPLMYEGKRYDEACELCNFTIAKNQEKNEYLPLFEKTRFAKDISSPVVIRAICEFRKLLNDIIRRYGSVHKIHLELTRDFGISFNDRKKIIKEIEQNEQSRIKALETIKELKLEETSKNIQIVRLFEDQKGICPYSGLKMDLKCLDELVIDYIRPYNRSLDDSYSNKVLTFKKLNDLKQGKTPFEAFGEDEKLWAEINERIKEYNGKKRFKIFDKFFKDKKPFDFTEQTLQDTRWLTKLVASYLNEYLSFLPISEDENTALGYGEKGSKQHVILSSGMITQMLRNFWYLGFKNHKDYKNNAMDAIIVAFTTNSIIFTFNNFKKELDLAKAEFYANKISESDYLLKRKFLPPFSGFKEQALEKVKNIFVSHSLKIKNKGTLHELTPLKIKELKNTYGDLDLAVKLGKIRKYNDKYYANAKGSLVRTDLFADKENKFHAVSIYKADFSTKKLPNKTPATTSNGETKEGIEMNENYNFCMSLYKNTPISVKIKGMKEPIICYYHGFNTSGSKITYKKHDNNYHNLSEDEMVVFRKNDKESIVVGKILEIKKYSISPSGELSLIENEERKWF

SEQ ID NO: 335 - protein, 965 aa, Campylobacter coli
MKIIGFNLGIANIGWALRENDEIIDCGVRVFDIPENPKNGNSLALERRENKARMKIVKRKKARMLATKTFLKKELNVDLSKLFLIGSTQSIYELRTKALSSLISKEELSAIILHIAKHRGYDDSALKNENGTIIEALNKNKEAMLKFKSVGEYFYKNFVQNKEVKKIRNTTEDYSNSVPRSLLKQELDLILDKQKELGLIKNADFKAKLFEIIFFKRPLKDFSNKIGNCIFFENEKRAAKNTISACEFVALGKVVNLLKSIEKDIGIVYEKDSINEIMSIILDKTSISYKKIRDILNLPQDINFKGLDYSKNNAENSKLVDLKKLNEFKKALGDGFANLDKDILDSIATDITLTKDTATLKEKLKNYNVLNAEQIEKLSELVFNDHINLSLKALKQIIPLMYEGKRYDEACELCNFTIAKNQEKNEYLPLFEKTRFAKDISSPVVIRAICEFRKLLNDIIRRYGSVHKIHLELTRDFGISFNDRKKIIKEIEQNEQSRIKALETIKELKLEETSKNIQIVRLFEDQKGICPYSGLKMDLKCLDELVIDYIRPYNRSLDDSYSNKVLTFKKLNDLKQGKTPFEAFGEDEKLWAEINERIKEYNGKKRFKIFDKFFKDKKPFDFTEQTLQDTRWLTKLVASYLNEYLSFLPISEDENTALGYGEKGSKQHVVLSSGMITQMLRNFWYLGFKNHKNYKNNAMDAIIVAFTTNSIIFAFNNFKKELDLAKAEFYANKISESDYLLKRKFLPPFSGFKEQALEKVKNIFVSHSLKIKNKGTLHELTPLKIKELKNTYGDLDLAVKLGKIRKYNDKYYANTKGSLVRTDLFVDKENKFHAVSIYKADFSTKKLPNKTPATTSNGETKEGIEMNENYNFCMSLYKNTPVSVKIKGMKEPIICYYHGFNTSGSKITYKKHDNNYHNLSEDEMVVFRKNDKESIVVGKILEIKKYSISPSGELSLIENEKRKWF

SEQ ID NO: 336 - protein, 965 aa, Campylobacter coli
MKIIGFNLGIANIGWALRENDEIIDCGVRVFDIPENPKNGNSLALERRENKARMKIVKRKKARMLATKTFLKKELNVDLSKLFLIGSTQSIYELRTKALSSLISKEELSAIILHIAKHRGYDDSALKNENGTIIEALNKNKEAMLKFKSVGEYFYKNFVQNKEVKKIRNTTEDYSNSVPRSLLKQELDLILDKQKELGLIKNADFKEKLFEIIFFKRPLKDFSNKIGNCIFFENEKRAAKNTISACEFVALGKVVNLLKSIEKDIGIVYEKDSINEIMSIILDKTSISYKKIRDILNLPQDINFKGLDYSKNNAENSKLVDLKKLNEFKKALGDGFANLDKDILDSIATDITLTKDTATLKEKLKNYNVLNAEQIEKLSELVFNDHINLSLKALKQIIPLMYEGKRYDEACELCNFTIAKNQEKNEYLPLFEKTRFAKDISSPVVIRAICEFRKLLNDIIRRYGSVHKIHLELTRDFGISFNDRKKIIKEIEQNEQSRIKALETIKELKLEETSKNIQIVRLFEDQKGICPYSGLKMDLKCLDELVIDYIRPYNRSLDDSYSNKILTFKKLNDLKQGKTPFEAFGEDEKLWAEINERIKEYNGKKRFKIFDKFFKDKKPFDFTEQTLQDTRWLTKLVASYLNEYLLFLPINEDENTALGYGEKGSKQHVVLSSGMITQMLRNFWYLGFKNHKDYKNNAMDAIIVAFTTNSIIFAFNNFKKELDLAKAEFYANKISESDYLLKRKFLPPFSGFKEQALEKVKNIFVSHSLKIKNKGTLHELTPLKIKELKNTYGDLDLAVKLGKIRKYNDKYYANAKGSLVRTDLFADKENKFHAVSIYKADFSTKKLPNKTPATTSNGETKEGIEMNENYNFCMSLYKNTPISVKIKGMKEPIICYYHGFNTSGSKITYKKHDNNYHNLSEDEMVVFRKNDKESIVVGKILEIKKYSISPSGELSLIENEERKWF

SEQ ID NO: 337 - protein, 933 aa, Campylobacter coli
MKIIGFNLGIANIGWALRENDEIIDCGVRVFDIPENPKNGNSLALERRENKARMKIVKRKKARMLATKTFLKKELNVDLSKLFLIGSTQSIYELRTKALSSLISKEELSVIILHIAKHRGYDDSALKNENGTIIEALNKNKETMLKFKSVGEYFYKNFVQNKEVKKIRNTTEDYSNSVPRSLLKQELDLILDRQKELGLIKNADFKAKLFEIIFFKRPLKDFSNKIGNCIFFENEKRAAKNTISACEFVALGKVVNLLKSIEKDIGIVYEKDSINEIMSIILDKTSISYKKIRDILNLPQDINFKGLDYSKNNVENSKLVDLKKLNEFKKALGDGFTNLDKDILDSIATDITLTKDTATLKEKLKNYNVLNAEQIEKLSELVFNDHINLSLKALKQIIPLMYEGKRYDEACELCNFTIAKNQEKNEYLPLFEKTRFAKDISSPVVIRAICEFRKLLNDIIRRYGSVHKIHLELTRDFGISFNDRKKIIKEIEQNEQSRIKALETIKELKLEETSKNIQIVRLFEDQKGICPYSGLKMDLKCLDELVIDYIRPYNRSLDDSYSNKVLTFKKLNDLKQGKTPFEAFGEDEKLWAEINERIKEYNGKKRFKIFDKFFKDKKPFDFTEQTLQDTRWLTKLVASYLNEHLSFLPISEDENTALGYGEKGSKQHVILSSGMITQMLRNFWYLGFKNHKDYKNNAMDAIIVAFTTNSIIFTFNNFKKELDLAKAEFYANKISESDYLLKRKFLPPFSGFKEQALEKVKNIFVSHSLKIKNKGTLHELTPLKIKELKNTYGDLDLAVKLGKIRKYNDKYYANANGSLVRSDLFIDKKNKFHAVPIYKADFSTKKLPNKTPATTSNGETKEGIEMNENYNFCMSLYKNTPISVKIKGMKESIICYYHGFNTSGSKITYKKHDNNYHNLSEDEMVVFRKNDKE

SEQ ID NO: 338 - protein, 666 aa, Campylobacter jejuni
KGEKGTYFIEFKKYKEFIKALDEHSLSQDDLNEIAKDITLIKDEIKLKKALAKYDLKENQIDSLSKLEFKDHLNISFKALKLITPLMLEGKKYDEACNELNLKVAINEDKKDFLPAFNETYYKDEVTNPVVLRAIKEYRKILNALLKKYGKVHKINIELAREVGKNHSQRAKIEKEQNENYKAKKDAELECEKLGLKINSKNILKLRLFKEQKEFCVYSGEKIKLSDLQDEKMLEIDHIYPYSRSFDDSYMNKVLVFAKQNQEKLNKTPFEAFGNDSTKWQKIEVLTKNLPTKKQKRILDKNYKDKEQKDFKDRNLNDTRYIARLVLNYTKDYLDFLPLSDDENTKLNDTQKGSKVHVEAKSGMLTSALRHTWGFSTKDRNNHLHHAIDAAIIAYANNSIVKAFSDFKKEQESNSAELYAKKISELDYKNKRKFFEPFSGFRQKVLDKIDEIFVSKPERKKPSGALHEETFRKEEEFYQSYGGKEGVLKALELGKIRKVNGKIVKNGDMFRVDIFKHKKTNKFYAVPIYTMDFALKVLPNKAVARSKKGEIKDWILMDEDYEFCFSLYKDSLILIQTKDMQEPELVYFNAFTSSTVSLIVSKHDNKFETLSKNQKILFKNANEKEVIAKSIGIQNLKVFEKYIVSALGEVTKAEFRQREDFKNELR

SEQ ID NO: 339 - protein, 190 aa, Campylobacter jejuni
MAFDIGISSIGWAFSENDELKDCGVRIFTKVENPKTGESLALPRRLARSARKRLARRKARLNHLKHLIANEFKLNYEDYQSFDESLAKAYKGSLISPYELRFRALNELLSKQDFARVILHIAKRRGYDDIKNSDDKEKGAILKAIKQNEEKLANYQSVGEYLYKEYFQKFKENSKEFTNVRNKKKVMNAA

SEQ ID NO: 340 - protein, 985 aa, Campylobacter jejuni
MAKILAFDIGISSIGWAFVENDELKDCGVRIFTKAENPKTGESLALPRRLARSARKRLARRKARLNHLKHLIANEFKLNYEDYQSFDESLAKAYKGTLISPYELRFKALNELLSKQDLARVILHIAKRRGYDNIKNSDDKEKGAILKAVKENEEKLANYKSVGEYLYKEYFQKFKENSKEFINVRNKKESYERCIAQSFLKDELKLIFQKQREFGFNFSKKFEEEVLSVAFYKRALKDFSHLVGNCSFFVDEKRAPKNSPLAFEFVALTRIVNLLNNLNKNNSYIKDDLNALLSEVLKNGTLTYKQTKKILGLSDDYEFKGQKGNYFIEFKKYKEFIKALCEHNLNQDDLNEIAKDITLVKDETKLKKALAKYDLNQNQIENLSKIEFKDHLNISFKALKLIVPLMREGKKYDEVCNELNLKTAINEDKKEFLPAFNETYYKDEVNNPVVLRAIKEYRKVLNSLLKKYGKVHKINIELAREVGKNHRERSKIEKEQNENFKAKKDAELECEKLGLKINSKNILKLRLFKEQKEFCVYSGEKIKISDLQDEKMLEIDHIYPYSRSFDDSYMNKVLVFTKQNQEKLNKTPFEAFGKDDVKWQKIETLAKNLPAKKQKRILDKNYKDKEQKDFKDRNLNDTRYIARLVLNYTKDYLEFLPLSDDENIKLNDTQKGSKVHVEAKSGMLTSVLRHTWGFSTKDRNNHLHHAIDAVIIAYANASVVKAFSDFKKEQENYTAELYAKKINELDFKNKRKFFEPFSNFRQKVLEKIDEIFVSKPERKKPSGALHEETFYKEEEFYKEYGGKEGVLKALELGKIRKVNGKIVSNANMFRVDIFKYKKTNKFYAVPIYTMDFALGILPNKAVVGGKDKQGIIKDWLLMDENYEFCFSLYKDSLILLQTKDMQEPELVYFKSFKSSTAGLVVSKHDNKFENLNENQKKLFKSANEKKVVAEGIGIQNLKVFEKYIVSALGEITKAEIKERENFKKK

SEQ ID NO: 341 - protein, 987 aa, Campylobacter jejuni
MARILAFDIGISSIGWAFSENDELKDCGVRIFTKAENPKTGESLALPRCLARSARKRLARRKARLNHLKHLIANEFKLNYEDYQSFDESLAKAYKGSLISPYELRFRALNELLSKQDFARVILHIAKRRGYDDIKNNGDEEKGEILKAIKQNEEKLVSYQSVGEYLYKEYFQKFKENSKEFINVRNKKESYERCIAQSFLKDELKLIFQKQRKFGFSFSKKFEEEVLSVAFYKRALKDFSHLVGNCSFFTDEKRAPKNSPLAFMFVALTRIINLLNNLKNTEGILYTKDDLNTLLNEVLKNGTLTYKQTKKLLGLSNDYEFKGEKGTYFIEFQKYKEFVKALGEHNLSQDDLNEIAKDITLIKDEIKLKKALAKYDLNQNQIDSLSKLEFKDHLNISFKALKLITPLMLEGKKYDEACNELNLKVAINEDKKDFLPAFNETYYKDEVTNPVVLRAIKEYRKVLNALLKKYGKVHKINIELAREVGKNHSQRAKIEKEQNENYKAKKDAELECEKLGLKINSKNILKLRLFKEQKEFCVYSGEKIKISDLQDEKMLEIDHIYPYSRSFDDSYMNKVLVFTKQNQEKLNKTPFETFGNDRVKWQKIEVLAKNLPTKKQKRILDKNYKDKEQKDFKDRNLNDTRYIARLVLNYTKDYLDFLPLSDDENTKLNDTQKGSKVHVEAKSGMLTSTLRHTWGFSTKDRNNHLHHAIDAAIIAYANNSIVKAFSDFKKEQESNTAELYAKKISELDYKNKRKFFEPFSGFRQKLLDKIDEIFVSKPERKKPSGALHEETFRKEEEFYQSYGGKEGVLKALELGKIRKVNGKIVSNGDMFRVDIFKHKKTNKFYAVPIYTMDFALKVLPNKAVVQGKDKKSGLIKDWILMDENYEFCFSLYKDSLILIQTKDMQEPELVYYERLDSSNASLTVSKHDNKFETLSKNQKILFKNANEKEVIAKSIGIQNLKVFEKYIVSALGEVTKAEFRQREDFKK

SEQ ID NO: 342 - protein, 987 aa, Campylobacter jejuni
MARILAFDIGISSIGWAFSENDELKDCGVRIFTKAENPKTGESLALPRRLARSARKRLARRKARLNHLKHLIANEFKLNYEDYQSFDEGLAKAYKGSLISPYELRFRALNELLSKQDFARVILHIAKRRGYDDIKNNGDEEKSEILKAIKQNEEKLVNYQSVGEYLYKEYFQKFKENSKEFINVRNKKESYERCIAQSFLKDELKLIFQKQREFGFSFSKKFEEEVLSVAFYKRALKDFSHLVGNCSFFTDEKRAPKNSPLAFMFVALTRIINLLNNLKNTEGILYTKDDLNTLLNEVLKNGTLTYKQTKKLLGLSDDYEFKGEKGTYFIEFKKYKEFIKALGEHNLSQDNLNEIAKDITLIKDEIKLKKALAKYDLNQNQIDSLSKLEFKDHLNISFKALKLITPLMLEGKKYDEAYNELNLKVAINEDKKDFLPAFNETYYKDEVTNPVVLRAIKEYRKVLNALLKKYGKVHKINIELAREVGKNHSQRAKIEKEQNENYKAKKDAELECEKLGLKINSKNILKLRLFKEQKEFCAYSGEKIKISDLQDEKMLEIDHIYPYSRSFDDSYMNKVLVFTKQNQEKLNQTPFEAFGNDSAKWQKIEVLAKNLPTKKQKRILDKNYKDKEQKDFKDRNLNDTRYIARLVLNYTKDYLDFLPLSDDENTKLNDTQKGSKVHVEAKSGMLTSALRHTWGFSAKDRNNHLHHAIDAVIIAYANNSIVKAFSDFKKEQESNSAELYAKKISELDYKNKRKFFEPFSGFRQKVLDKIDEIFVSKPERKKPSGALHEETFRKEEEFYQSYGGKEGVLKALELGKIRKVNGKIVKNGDMFRVDIFKHKKTNKFYAVPIYTMDFALKVLPNKAVVQGKDKKSGLIKDWILMDENYEFCFSLYKDSLILIQTKDMQEPELVYFNAFTSSTVSLIVSKHDNKFETLSKNQKILFKNANEKEVIAKSIGIQNLKVFEKYIVSALGEVTKAEFRQREDFKK

SEQ ID NO: 343 - protein, 961 aa, Campylobacter jejuni
MARILAFDIGISSIGWAFSENDELKDCGVRIFTKAENPKTGESLALPRRLARSARKRLARRKARLNHLKHLIANEFKLNYEDYQSFDESLAKAYKGSLISPYELRFRALNELLSKQDFARVILHIAKRRGYDDIKNNGDEEKGKILKAIKQNEEKLVNYQSVGEYLYKEYFQKFKENSKEFINVRNKKESYERCITQSFLKYELKLIFQKQREFGFSFSKKFEEEVLSVAFYKRALKDFSHLVGNCSFFSDEKRAPKNSPLAFMFVALTRIINLLNNLKNTEGILYTKDDLNALLNEVLKNGTLTYKQTKKLLGLSDDYEFKGEKGTYFIEFKKYKEFIKALGEHNLSQDDLNEIAKDITLIKDEIKLKKALAKYDLNQNQIDSLSKLEFKDHLNIGFKALKLITPLMLEGKKYDEACNELNLKVAINEDKKDFLPAFNETYYKDEVTNPVVLRAIKEYRKVLNALLKKYGKVHKINIELAREVGKNHSQRAKIEKEQNENYKAKKDAELECEKLGLKINSKNILKLRLFKEQKEFCAYSGEKIKLSDLQDEKMLEIDHIYPYSRSFDDSYMNKVLVFTKQNQEKLNKTPFEAFGNDNVKWQKIEVLAKNLPEKKQKRILDKNYKDKEQKDFKDRNLNDTRYIARLVLNYTKDYLDFLPLSDDENTKLKGSKVHVEAKSGMLTSALRHTWGFSTKDRNNHLHHAIDAAIIAYANNSIVKDFSDFKKEQESNSAELYAKKISELDYKNKRKFFEPFSGFRQKVLDKIDEIFVSKPERKKPSGALHEETFRKEEEFYQSYGGKEGVLKALELGKIRKVNGKIVKNGDMFRVDIFKHKKTNKFYAVPIYTMDFALKVLPNKAVARSKKGEIKDWILMDENYEFCFSLYKDSLILIQTKDMQEPELVYFNAFTSSTVSLIVSKHDNKFETLSKNLKVFEKYIVSALGEVTKAEFRQREDFKNELR

SEQ ID NO: 344 - protein, 984 aa, Campylobacter jejuni
MARILAFDIGISSIGWAFSENDELKDCGVRIFTKAENPKTGESLALPRRLARSARKRLARRKARLNHLKHLIANEFKLNYEDYQSFDESLAKAYKGSLISPYELRFRALNELLSKQDFARVILHIAKRRGYDDIKNNGDEEKGKILKAIKQNEEKLVNYQSVGEYLYKEYFQKFKENSKEFINVRNKKESYERCITQSFLKYELKLIFQKQREFGFSFSKKFEEEVLSVAFYKRALKDFSHLVGNCSFFTDEKRAPKNSPLAFMFVALTRIINILNNLKNTEGILYTKDDLNALLNEVLKNGTLTYKQTKKLLGLSDDYEFKGEKGTYFIEFKKYKEFIKALGEHNLSQDDLNEIAKDITLIKDEIKLKKALAKYDLNQNQIDSLSKLEFKDHLNISFKALKLITPLMLEGKKYDEACNELNLKVAINEDKKDFLPAFNETYYKDEVTNPVVLRAIKEYRKILNALLKKYGKVHKINIELAREVGKNHSQRAKIEKEQNENYKAKKDAEIECEKLGLKINSKNILKLRLFKEQKEFCAYSGEKIKISDLQDEKMLEIDHIYPYSRSFDDSYMNKVLVFTKQNQEKLNQTPFEAFGNDSAKWQKIEVLAKNLPTKKQKRILDKNYKDKEQKDFKDRNLNDTRYIARLVLNYTKDYLDFLPLSDDENTKLNDTQKGSKVHVEAKSGMLTSALRHTWGFSAKDRNNHLHHAIDAVIIAYANNSIVKAFSDFKKEQESNSAELYAKKISELDYKNKRKFFEPFSGFRQKVLDKIDEIFVSKPERKKPSGALHEETFRKEEEFYQSYGGKEGVLKALELGKIRKVNGKIVKNGDMFRVDIFKHKKTNKFYAVPIYTMDFALKVLPNKAVARSKKGEIKDWILMDENYEFCFSLYKDSLILIQTKDMQEPEFVYYNAFTSSTVSLIVSKHDNKFETLSKNQKILFKNANEKEVIAKSIGIQNLKVFEKYIVSALGEVTKAEFRQREDFKK

SEQ ID NO: 345 - protein, 987 aa, Campylobacter jejuni
MARILAFDIGISSIGWAFSENDELKDCGVRIFTKAENPKTGESLALPRRLARSARKRLARRKARLNHLKHLIANEFKLNYEDYQSFDESLAKAYKGSLISPYELRFRALNELLSKQDFARVILHIAKRRGYDDIKNNGDEEKGKILKAIKQNEEKLVSYQSVGEYLYKEYFQKFKENSKEFINVRNKKESYERCIAQSFLKDELKLIFQKQREFGFSFSKKFEEEVLSVAFYKRALKDFSHLVGNCSFLLMKKERQKNSPLAFMFVALTRIINLLNNLKNTEGILYTKDDLNTLLNEALKNGTLTYKQTKKLLGLSNDYEFKGEKGTYFIEFQKYKEFVKALGEHNLSQDDLNEIAKDITLIKDEIKLKKALAKYDLNQNQIDSLSKLEFKDHLNISFKALKLITPLMLEGKKYDEACNELNLKVAINEDKKDFLPAFNETYYKDEVTNPVVLRAIKEYRKVLNALLKKYGKVHKINIELAREVGKNHSQRAKIEKEQNENYKAKKDAELECEKLGLKINSKNILKLRLFKEQKEFCVYSGEKIKISDLQDEKMLEIDHIYPYSRSFDDSYMNKVLVFTKQNQEKLNKTPFETFGNDRVKWQKIEVLAKNLPTKKQKRILDKNYKDKEQKDFKDRNLNDTRYIARLVLNYTKDYLDFLPLSDDENTKLNDTQKGSKVHVEAKSGMLTSTLRHTWGFSTKDRNNHLHHAIDAAIIAYANNSIVKAFSDFKKEQESNTAELYAKKISELDYKNKRKFFEPFSGFRQKLLDKIDEIFVSKPERKKPSGALHEETFRKEEEFYQSYGGKEGVLKALELGKIRKVNGKMVKNGDMFRVDIFKHKKTNKFYAVPIYTMDFALKVLPNKAVVQGKDKKSGLIKDWILMDENYEFCFSLYKDSLILIQTKDMQEPELVYYERLDSSNASLTVSKHDNKFETLSKNQKILFKNANEKEVIAKSIGIQNLKVFEKYIVSALGEVTKAEFRQREDFKK

SEQ ID NO: 346 - protein, 987 aa, Campylobacter jejuni
MARILAFDIGISSIGWAFSENDELKDCGVRIFTKAENPKTGESLALPRRLARSARKRLARRKARLNHLKHLIANEFKLNYEDYQSFDESLAKAYKGSLISPYELRFRALNELLSKQDFARVILHIAKRRGYDDIKNNGDEEKSEILKAIKQNEEKLVNYQSVGEYLYKEYFQKFKENSKEFINVRNKKESYERCIAQSFLKDELKLIFQKQREFGFSFSKKFEEEVLSVAFYKRALKDFSHLVGNCSFFTDEKRAPKNSPLAFMFVALTRIINLLNNLKNTEGILYTKDDLNTLLNEVLKNGTLTYKQTKKLLGLSDDYEFKGEKGTYFIEFKKYKEFIKALGEHNLSQDNLNEIAKDITLIKDEIKLKKALAKYDLNQNQIDSLSKLEFKDHLNISFKALKLITPLMLEGKKYDEAYNELNLKVAINEDKKDFLPAFNETYYKDEVTNPVVLRAIKEYRKVLNALLKKYGKVHKINIELAREVGKNHSQRAKIEKEQNENYKAKKDAELECEKLGLKINSKNILKLRLFKEQKEFCAYSGEKIKISDLQDEKMLEIDHIYPYSRSFDDSYMNKVLVFTKQNQEKLNQTPFEAFGNDSAKWQKIEVLAKNLPTKKQKRILDKNYKDKEQKDFKDRNLNDTRYIARLVLNYTKDYLDFLPLSDDENTKLNDTQKGSKVHVEAKSGMLTSALRHTWGFSAKDRNNHLHHAIDAVIIAYANNSIVKAFSDFKKEQESNSAELYAKKISELDYKNKRKFFEPFSGFRQKVLDKIDEIFVSKPERKKPSGALHEETFRKEEEFYQSYGGKEGVLKALELGKIRKVNGKIVKNGDMFRVDIFKHKKTNKFYPVPIYTMDFALKVLPNKAVVQGKDKKSGLIKDWILMDENYEFCFSLYKDSLILIQTKDMQEPELVYFNAFTSSTVSLIVSKHDNKFETLSKNQKILFKNANEKEVIAKSIGIQNLKVFEKYIVSALGEVTKAEFRQREDFKK

SEQ ID NO: 347 - protein, 987 aa, Campylobacter jejuni
MARILAFDIGISSIGWAFSENDELKDCGVRIFTKAENPKTGESLALPRRLARSARKRLARRKARLNHLKHLIANEFKLNYEDYQSFDESLAKAYKGSLISPYELRFRALNELLSKQDFARVILHIAKRRGYDDIKNNGDEEKSEILKAIKQNEEKLVNYQSVGEYLYKEYFQKFKENSKEFINVRNKKESYERCIAQSFLKDELKLIFQKQREFGFSFSKKFEEEVLSVAFYKRALKDFSHLVGNCSFFTDEKRAPKNSPLAFMFVALTRIINLLNNLKNTEGILYTKDDLNTLLNEVLKNGTLTYKQTKKLLGLSDDYEFKGEKGTYFIEFKKYKEFIKALGEHNLSQDNLNEIAKDITLIKDEIKLKKALAKYDLNQNQIDSLSKLEFKDHLNISFKALKLITPLMLEGKKYDEAYNELNLKVAINEDKKDFLPAFNETYYKDEVTNPVVLRAIKEYRKVLNALLKKYGKVHKINIELAREVGKNHSQRAKIEKEQNENYKAKKDAELECEKLGLKINSKNILKLRLFKEQKEFCAYSGEKIKISDLQDEKMLEIDHIYPYSRSFDDSYMNKVLVFTKQNQEKLNQTPFEAFGNDSAKWQKIEVLAKNLPTKKQKRILDKNYKDKEQKDFKDRNLNDTRYIARLVLNYTKDYLDFLPLSDDENTKLNDTQKGSKVHVEAKSGMLTSALRHTWGFSAKDRNNHLHHAIDAVIIAYANNSIVKAFSDFKKEQESNSAELYAKKISELDYKNKRKFFEPFSGFRQKVLDKIDEIFVSKPERKKPSGALHEETFRKEEEFHQSYGGKEGVLKALELGKIRKVNGKIVKNGDMFRVDIFKHKKTNKFYAVPIYTMDFALKVLPNKAVVQGKDKKSGLIKDWILMDENYEFCFSLYKDSLILIQTKDMQEPELVYFNAFTSSTVSLIVSKHDNKFETLSKNQKILFKNANEKEVIAKSIGIQNLKVFEKYIVSALGEVTKAEFRQREDFKK

SEQ ID NO: 348 - protein, 987 aa, Campylobacter jejuni
MARILAFDIGISSIGWAFSENDELKDCGVRIFTKAENPKTGESLALPRRLARSARKRLARRKARLNHLKHLIANEFKLNYEDYQSFDESLAKAYKGSLISPYELRFRALNELLSKQDFARVILHIAKRRGYDDIKNNGDEEKSEILKAIKQNEEKLVNYQSVGEYLYKEYFQKFKENSKEFINVRNKKESYERCIAQSFLKDELKLIFQKQREFGFSFSKKFEEEVLSVAFYKRALKDFSHLVGNCSFFTDEKRAPKNSPLAFMFVALTRIINLLNNLKNTEGILYTKDDLNTLLNEVLKNGTLTYKQTKKLLGLSDDYEFKGEKGTYFIEFKKYKEFIKALGEHNLSQDNLNEIAKDITLIKDEIKLKKALAKYDLNQNQIDSLSKLEFKDHLNISFKALKLITPLMLEGKKYDEAYNELNLKVAINEDKKDFLPAFNETYYKDEVTNPVVLRAIKEYRKVLNALLKKYGKVHKINIELAREVGKNHSQRAKIEKEQNENYKAKKDAELECEKLGLKINSKNILKLRLFKEQKEFCAYSGEKIKISDLQDEKMLEIDHIYPYSRSFDDSYMNKVLVFTKQNQEKLNQTPFEAFGNDSAKWQKIEVLAKNLPTKKQKRILDKNYKDKEQKDFKDRNLNDTRYIARLVLNYTKDYLDFLPLSDDENTKLNDTQKGSKVHVEAKSGMLTSALRHTWGFSAKDRNNHLHHAIDAVIIAYANNSIVKAFSDFKKEQESNSAELYAKKISELDYKNKRKFFEPFSGFRQKVLDKIDEIFVSKPERKKPSGALHEETFRKEEEFYQSYGGKEGVLKALELGKIRKVNGKIVKNGDMFRVDIFKHKKTNKFYAVPIYTMDFALKVLPNKAVVQGKDKKSGLIKDWILMDENYEFCFSLYKDSLILIQTKDMQEPELVYFNAFTSSTVSLIVSKHDNKFETLSKNQKILFKNANEKEVIAKSIGIQNLKVFEKYIVSALGEVTKAEFRQREDFKK

SEQ ID NO: 349 - protein, 861 aa, Campylobacter jejuni
MARILAFDIGISSIGWAFSENDELKDCGVRIFTKAENPKTGESLALPRRLARSARKRLARRKARLNHLKHLIANEFKLNYEDYQSFDESLAKAYKGSLISPYELRFRALNELLSKQDFARVILHIAKRRGYDDIKNNGDEEKSEILKAIKQNEEKLVNYQSVGEYLYKEYFQKFKENSKEFINVRNKKESYERCITQSFLKDELKLIFQKQREFGFSFSKKFEEEVLSVAFYKRALKDFSHLVGNCSFFTDEKRAPKNSPLAFMFVALTRIINILNNLKNTEGILYTKDDLNALLNEVLKNGTLTYKQTKKLLGLSDDYEFKGEKGTYFIEFKKYKEFIKALGEHNLSQDDLNEIAKDITLIKDEIKLKKALAKYDLNQNQIDSLSKLEFKDHLNISFKALKLITPLMLEGKKYDEACNELNLKVAINEDKKDFLPAFNETYYKDEVTNPVVLRAIKEYRKILNALLKKYGKVHKINIELAREVGKNHSQRAKIEKEQNENYKAKKDAEIECEKLGLKINSKNILKLRLFKEQKEFCAYSGEKIKLSDLQDEKMLEIDHIYPYSRSFDDSYMNKVLVFTKQNQEKLNKTPFEAFGNDSTKWQKIEVLAKNLPEKKQKRILDKNYKDKEQKDFKDRNLNDTRYIARLVLNYTKDYLDFLPLSDDENTKLNDTQKGSKVHVEAKSGMLTSALRHTWGFSAKDRNNHLHHAIDAAIIAYANNSIVKAFSDFKKEQESNSVELYAKKISELDYKNKRKFFEPFSGFRQKVLDKIDEIFVSKPERKKPSGALHEETFRKEEEFYQSYGGKEGVLKALELGKIRKVNGKIVKNGDMFRVDIFKHKKTNKFLCCANLYYGFCFKSITK

SEQ ID NO: 350 - protein, 462 aa, Campylobacter jejuni
MARILAFDIGISSIGWAFSENDELKDCGVRIFTKAENPKTGESLALPRRLARSARKRLARRKARLNHLKHLIANEFKLNYEDYQSFDESLAKAYKGSLISPYELRFRALNELLSKQDFARVILHIAKRRGYDDIKNNGDEEKSEILKAIKQNEEKLVNYQSVGEYLYKEYFQKFKENSKEFINVRNKKESYERCITQSFLKDELKLIFQKQREFGFSFSKKFEEEVLSVAFYKRALKDFSHLVGNCSFFTDEKRAPKNSPLAFMFVALTRIINILNNLKNTEGILYTKDDLNALLNEVLKNGTLTYKQTKKLLGLSDDYEFKGEKGTYFIEFKKYKEFIKALGEHNLSQDDLNEIAKDITLIKDEIKLKKALAKYDLNQNQIDSLSKLEFKDHLNISFKALKLITPLMLEGKKYDEACNELNLKVAINEDKKDFLPAFNETYYKDEVTNPVVLRAIKEYRKS

SEQ ID NO: 351 - protein, 984 aa, Campylobacter jejuni
MARILAFDIGISSIGWAFSENDELKDCGVRIFTKAENPKTGESLALPRRLARSARKRLARRKARLNHLKHLIANEFKLNYEDYQSFDESLAKAYKGSLISPYELRFRALNELLSKQDFARVILHIAKRRGYDDIKNNGDEEKSEILKAIKQNEEKLVNYQSVGEYLYKEYFQKFKENSKEFINVRNKKESYERCITQSFLKDELKLIFQKQREFGFSFSKKFEEEVLSVAFYKRALKDFSHLVGNCSFFTDEKRAPKNSPLAFMFVALTRIINLLNNLKNTEGILYTKDDLNALLNEVLKNGTLTYKQTKKLLGLSDDYEFKGEKGTYFIEFKKYKEFIKALDEHSLSQDDLNEIAKDITLIKDEIKLKKALAKYDLNQNQIDSLSKLEFKDHLNISFKALKLITPLMLEGKKYDEACNELNLKVAINEDKKDFLPAFNETYYKDEVTNPVVLRAIKEYRKILNALLKKYGKVHKINIELAREVGKNHSQRAKIEKEQNENYKAKKDAEIECEKLGLKINSKNILKLRLFKEQKEFCAYSGEKIKISDLQDEKMLEIDHIYPYSRSFDDSYMNKVLVFTKQNQEKLNKTPFEAFGNDGVKWQKIEVLAKNLPEKKQKRILDKNYKDKEQKDFKDRNLNDTRYIARLVLNYTKDYLDFLPLSDDENTKLNDTQKGSKVHVEAKSGMLTSALRHTWGFSTKDRNNHLHHAIDAAIIAYANNSIVKAFSDFKKEQESNSAELYAKKISELDYKNKRKFFEPFSGFRQKVLDKIDEIFVSKPERKKPSGALHEETFRKEEEFYQSYGGKEGVLKALELGKIRKVNGKIVKNGDMFRVDIFKHKKTNKFYAVPIYTMDFALKVLPNKAVARSKKGEIKDWILMDENYEFCFSLYKDSLILIQTKDMQEPELVYFNAFTSSTVSLVVSKHDNKFETLSKNQKILFKNANEKEVIAKSIGIQNLKVFEKYIVSALGEVTKAEFRQREDFKK

SEQ ID NO: 352 - protein, 984 aa, Campylobacter jejuni
MARILAFDIGISSIGWAFSENDELKDCGVRIFTKAENPKTGESLALPRRLARSARKRLARRKARLNHLKHLIANEFKLNYEDYQSFDESLAKAYKGSLISPYELRFRALNELLSKQDFARVILHIAKRRGYDDIKNSDDKEKGAILKAIKQNEEKLANYQSVGEYLYKEYFQKFKENSKEFTNVRNKKESYERCIAQSFLKDELKLIFKKQREFGFSFSKKFEEEVLSVAFYKRALKDFSHLVGNCSFFTDEKRAPKNSPLAFMFVALTRIINLLNNLKNTEGILYTKDDLNALLNEVLKNGTLTYKQTKKLLGLSDDYEFKGEKGTYFIEFKKYKEFIKALGDHSLSQDDLNEIAKDITLIKDEIKLKKALAKYDLNQNQIDSLSKLEFKDHLNISFKALKLITPLMLEGKKYDEACNELNLKVAINEDKKDFLPAFNETYYKDEVTNPVVLRAIKEYRKVLNALLKKYGKVHKINIELAREVGKNYSQRAKIEKEQNENYKAKKDAELECEKLGLKINSKNILKLRLFKEQKEFCAYSGEKIKISDLQDEKMLEIDHIYPYSRSFDDSYMNKVLVFTKQNQEKLNQTPFEAFGNDSAKWQKIEVLAKNLPTKKQKRILDKNYKDKEQKDFKDRNLNDTRYIARLVLNYTKDYLDFLPLSDDENTKLNDTQKGSKVHVEAKSGMLTSALRHTWGFSAKDRNNHLHHAIDAVIIAYANNSIVKAFSDFKKEQESNSAELYAKKISELDYKNKRKFFEPFSGFRQKVLDKIDEIFVSKPERKKPSGALHEETFRKEEEFYQSYGGKEGVLKALELGKIRKVNGKIVKNGDMFRVDIFKHKKTNKFYAVPIYTMDFALKVLPNKAVARSKKGEIKDWILMDENYEFCFSLYKDSLILIQTKDMQEPEFVYYNAFTSSTVSLIVSKHDNKFETLSKNQKILFKNANEKEVIAKSIGIQNLKVFEKYIVSALGEVTKAEFRQREDFKK

SEQ ID NO: 353 - protein, 984 aa, Campylobacter jejuni
MARILAFDIGISSIGWAFSENDELKDCGVRIFTKAENPKTGESLALPRRLARSARKRLARRKARLNHLKHLIANEFKLNYEDYQSFDESLAKAYKGSLISPYELRFRALNELLSKQDFARVILHIAKRRGYDDIKNSDDKEKGAILKAIKQNEEKLANYQSVGEYLYKEYFQKFKENSKEFTNVRNKKESYERCIAQSFLKDELKLIFKKQREFGFSFSKKFEEEVLSVAFYKRALKDFSHLVGNCSFFTDEKRAPKNSPLAFMFVALTRIINLLNNLKNTEGILYTKDDLNTLLNEVLKNGTLTYKQTKKLLGLSDDYEFKGEKGTYFIEFKKYKEFIKALGEHNLSQDDLNEIAKDITLIKDEIKLKKALAKYDLNQNQIDSLSKLEFKDHLNISFKALKLITPLMLEGKKYDEACNELNLKVAINEDKKDFLPAFNETYYKDEVTNPVVLRAIKEYRKVLNALLKKYGKVHKINIELAREVGKNYSQRAKIEKEQNENYKAKKDAELECEKLGLKINSKNILKLRLFKEQKEFCAYSGEKIKISDLQDEKMLEIDHIYPYSRSFDDSYMNKVLVFTKQNQEKLNKTPFEAFGNDSTKWQKIEVLAKNLPEKKQKRILDKNYKDKEQKDFKDRNLNDTRYIARLVLNYTKDYLDFLPLSDDENTKLNDTQKGLKVHVEAKSGMLTSALRHTWGFSAKDRNNHLHHAIDAVIIAYANNSIVKAFSDFKKEQESNSAELYAKKISELDYKNKRKFFEPFSGFRQKVLDKIDEIFVSKPERKKPSGALHEETFRKEEEFYQSYGGKEGVLKALELGKIRKVNGKIVKNGDMFRVDIFKHKKTNKFYAVPIYTMDFALKVLPNKAVARSKKGEIKDWILMDENYEFCFSLYKDSLILIQTKDMQEPEFVYYNAFTSSTVSLIVSKHDNKFETLSKNQKILFKNANEKEVIAKSIGIQNLKVFEKYIVSALGEVTKAEFRQREDFKK

SEQ ID NO: 354 - protein, 984 aa, Campylobacter jejuni
MARILAFDIGISSIGWAFSENDELKDCGVRIFTKAENPKTGESLALPRRLARSARKRLARRKARLNHLKHLIANEFKLNYEDYQSFDESLAKAYKGSLISPYELRFRALNELLSKQDFARVILHIAKRRGYDDIKNSDDKEKGAILKAIKQNEEKLANYQSVGEYLYKEYFQKFKENSKEFTNVRNKKESYERCIAQSFLKDELKLIFKKQREFGFSFSKKFEEEVLSVAFYKRALKDFSHLVGNCSFFTDEKRAPKNSPLAFMFVALTRIINLLNNLKNTEGILYTKDDLNALLNEVLKNGTLTYKQTKKLLGLSDDYEFKGEKGTYFIEFKKYKEFIKALGDHSLSQDDLNEIAKDITLIKDEIKLKKALAKYDLNQNQIDSLSKLEFKDHLNISFKALKLITPLMLEGKKYDEACNELNLKVAINEDKKDFLPAFNETYYKDEVTNPVVLRAIKEYRKVLNALLKKYGKVHKINIELAREVGKNYSQRAKIEKEQNENYKAKKDAELECEKLGLKINSKNILKLRLFKEQKEFCAYSGEKIKISDLQDEKMLEIDHIYPYSRSFDDSYMNKVLVFTKQNQEKLNQTPFEAFGNDSAKWQKIEVLAKNLPTKKQKRILDKNYKDKEQKNFKDRNLNDTRYIARLVLNYTKDYLDFLPLSDDENTKLNDTQKGSKVHVEAKSGMLTSALRHTWGFSAKDRNNHLHHTIDAVIIAYANNSIVKAFSDFKKEQESNSAELYAKKISELDYKNKRKFFEPFSGFRQKVLDKIDEIFVSKPERKKPSGALHEETFRKEEEFYQSYGGKEGVLKALELGKIRKVNGKIVKNGDMFRVDIFKHKKTNKFYAVPIYTMDFALKVLPNKAVARSKKGEIKDWILMDENYEFCFSLYKDSLILIQTKDMQEPEFVYYNAFTSSTVSLIVSKHDNKFETLSKNQKILFKNANEKEVIAKSIGIQNLKVFEKYIVSALGEVTKAEFRQREDFKK

SEQ ID NO: 355 - protein, 984 aa, Campylobacter jejuni
MARILAFDIGISSIGWAFSENDELKDCGVRIFTKAENPKTGESLALPRRLARSARKRLARRKARLNHLKHLIANEFKLNYEDYQSFDESLAKAYKGSLISPYELRFRALNELLSKQDFARVILHIAKRRGYDDIKNSDDKEKGAILKAIKQNEEKLANYQSVGEYLYKEYFQKFKENSKEFTNVRNKKESYERCIAQSFLKDELKLIFKKQREFGFSFSKKFEEEVLSVAFYKRALKDFSHLVGNCSFFTDEKRAPKNSPLAFMFVALTRIINLLNNLKNTEGILYTKDDLNTFLNEVLKNGTLTYKQTKKLLGLSDDYEFKGEKGTYFIEFKKYKEFIKALGDHNLSQDDLNEIAKDITLIKDEIKLKKALAKYDLNQNQIDSLSKLEFKDHLNISFKALKLITPLMLEGKKYDEACNELNLKVAINEDKKDFLPAFNETYYKDEVTNPVVLRAIKEYRKVLNALLKKYGKVHKINIELAREVGKNHSQRAKIEKEQNENYKAKKDAELECEKLGLKINSKNILKLRLFKEQKEFCAYSGEKIKISDLQDEKMLEIDHIYPYSRSFDDSYMNKVLVFTKQNQEKLNKTPFEAFGNDSAKWQKIEVLAKNLPTKKQKRILDKNYKDKEQKDFKDRNLNDTRYIARLVLNYTKDYLDFLPLSDDENTKLNDTQKGSKVHVEAKSGMLTSALRHTWGFSTKDRNNHLHHAIDAVIIAYANNSIVKAFSDFKKEQESNSAELYAKKISELDYKNKRKFFEPFSGFRQKVLDKIDEIFVSKPERKKPSGALHEETFRKEEEFYQSYGGKEGVLKALELGKIRKVNGKIVKNGDMFRVDIFKHKKTNKFYAVPIYTMDFALKVLPNKAVARSKKGEIKDWILMDENYEFCFSLYKDSLILIQTKDMQEPEFVYYNAFTSSTVSLIVSKHDNKFETLSKNQKILFKNANEKEVIAKSIGIQNLKVFEKYIVSALGEVTKAEFRQREDFKK

SEQ ID NO: 356 - protein, 987 aa, Campylobacter jejuni
MARILAFDIGISSIGWAFSENDELKDCGVRIFTKAENPKTGESLALPRRLARSARKRLARRKARLNHLKHLIANEFKLNYEDYQSFDESLAKAYKGSLISPYELRFRALNELLSKQDFARVILHIAKRRGYDDIKNSDDKEKGAILKAIKQNEEKLANYQSVGEYLYKEYFQKFKENSKEFTNVRNKKESYERCIAQSFLKDELKLIFKKQREFGFSFSKKFEEEVLSVAFYKRALKDFSHLVGNCSFFTDEKRAPKNSPLAFMFVALTRIINLLNNLKNTEGILYTKDDLNTLLNEVLKNGTLTYKQTKKLLGLSDDYEFKGEKGTYFIEFKKYKEFIKSLGDHSLSQDDLNEIAKDITLIKDEIKLKKALAKYDLNQNQIDSLSKLEFKDHLNISFKALKLITPLMLEGKKYDEACNELNLKVAINEDKKDFLPAFNETYYKDEVTNPVVLRAIKEYRKVLNALLKKYGKVHKINIELAREVGKNHSQRAKIEKEQNENYKAKKDAELECEKLGLKINSKNILKLRLFKEQKEFCAYSGEKIKISDLQDEKMLEIDHIYPYSRSFDDSYMNKVLVFTKQNQEKLNQTPFEAFGNDSAKWQKIEVLAKNLPTKKQKRILDKNYKDKEQKNFKDRNLNDTRYIARLVLNYTKDYLDFLPLSDDENTKLNDTQKGSKVHVEAKSGMLTSALRHTWGFSAKDRNNHLHHAIDAVIIAYANNSIVKAFSDFKKEQESNSAELYAKKISELDYKNKRKFFEPFSGFRQKVLDKIDEIFVSKPERKKPSGALHEETFRKEEEFYQSYGGKEGVLKALELGKIRKVNGKIVKNGDMFRVDIFKHKKTNKFYAVPIYTMDFALKVLPNKAVARSKKGEIKDWILMDENYEFCFSLYKDSLILIQTKDMQEPEFVYYNAFTSSTVSLIVSKHDNKFETLSKNQKILFKNANEKEVIAKSIGIQNLKVFEKYIVSALGEVTKAEFRQREDFKNELR

SEQ ID NO: 357 - protein, 987 aa, Campylobacter jejuni
MARILAFDIGISSIGWAFSENDELKDCGVRIFTKAENPKTGESLALPRRLARSARKRLARRKARLNHLKHLIANEFKLNYEDYQSFDESLAKAYKGSLISPYELRFRALNELLSKQDFARVILHIAKRRGYDDIKNSDDKEKGAILKAIKQNEEKLANYQSVGEYLYKEYFQKFKENSKEFTNVRNKKESYERCIAQSFLKDELKLIFKKQREFGFSFSKKFEEEVLSVAFYKRALKDFSHLVGNCSFFTDEKRAPKNSPLAFMFVALTRIINLLNNLKNTEGILYTKDDLNALLNEVLKNGTLTYKQTKKLLGLSDDYEFKGEKGTYFIEFKKYKEFIKALGDHSLSQDDLNEIAKDITLIKDEIKLKKALVKYDLNQNQIDSLSKLEFKDHLNISFKALKLITPLMLEGKKYDEACNELNLKVAINEDKKDFLPAFNETYYKDEVTNPVVLRAIKEYRKVLNALLKKYGKVHKINIELAREVGKNYSQRAKIEKEQNENYKAKKDAELECEKLGLKINSKNILKLRLFKEQKEFCAYSGEKIKISDLQDEKMLEIDHIYPYSRSFDDSYMNKVLVFTKQNQEKLNQTPFEAFGNDSAKWQKIEVLAKNLPTKKQKRILDKNYKDKEQKDFKDRNLNDTRYIARLVLNYTKDYLDFLPLSDDENTKLNDTQKGSKVHVEAKSGMLTSALRHTWGFSAKDRNNHLHHAIDAVIIAYANNSIVKAFSDFKKEQESNSAELYAKKISELDYKNKRKFFEPFSGFRQKVLDKIDEIFVSKPERKKPSGALHEETFRKEEEFYQSYGGKEGVLKALELGKIRKVNGKIVKNGDMFRVDIFKHKKTNKFYAVPIYTMDFALKVLPNKAVARSKKGEIKDWILMDENYEFCFSLYKDSLILIQTKDMQEPELVYFNAFTSSTVSLIVSKHDNKFETLSKNQKILFKNANEKEVIAKSIGIQNLKVFEKYIVSALGEVTKAEFRQREDFKNELR

SEQ ID NO: 358 - protein, 983 aa, Campylobacter jejuni; identical to SEQ ID NO: 236

SEQ ID NO: 359 - protein, 987 aa, Campylobacter jejuni
MARILAFDIGISSIGWAFSENDELKDCGVRIFTKAENPKTGESLALPRRLARSARKRLARRKARLNHLKHLIANEFKLNYEDYQSFDESLAKAYKGSLISPYELRFRALNELLSKQDFARVILHIAKRRGYDDIKNSDDKEKGAILKAIKQNEEKLVNYQSVGEYLYKEYFQKFKENSKEFTNVRNKKESYERCIAQSFLKDELKLIFKKQREFGFSFSKKFEEEVLSVAFYKRALKDFSHLVGNCSFFTDEKRAPKNSPLAFMFVALTRIINLLNNLKNTEGILYTKDDLNALLNEVLKNGTLTYKQTKKLLGLSDDYEFKGEKGTYFIEFKKYKEFIKALGDHSLSQDDLNEIAKDITLIKDEIKLKKALAKYDLNQNQIDSLSKLEFKDHLNISFKALKLITPLMLEGKKYDEACNELNLKVAINEDKKDFLPAFNETYYKDEVTNPVVLRAIKEYRKVLNALLKKYGKVHKINIELAREVGKNYSQRAKIEKEQNENYKAKKDAELECEKLGLKINSKNILKLRLFKEQKEFCAYSGEKIKISDLQDEKMLEIDHIYPYSRSFDDSYMNKVLVFTKQNQEKLNQTPFEAFGNDSAKWQKIEVLAKNLPTKKQKRILDKNYKDKEQKDFKDRNLNDTRYIARLVLNYTKDYLDFLPLSDDENTKLNDTQKGSKVHVEAKSGMLTSALRHTWGFSAKDRNNHLHHAIDAVIIAYANNSIVKAFSDFKKEQESNSAELYAKKISELDYKNKRKFFEPFSGFRQKVLDKIDEIFVSKPERKKPSGALHEETFRKEEEFYQSYGGKEGVLKALELGKIRKVNGKIVKNGDMFRVDIFKHKKTNKFYAVPIYTMDFALKVLPNKAVARSEKGEIKDWILMDENYEFCFSLYKDSLILIQTKDMQEPELVYFNAFTSSTVSLIVSKHDNKFETLSKNQKILFKNANEKEVIAKSIGIQNLKVFEKYIVSALGEVTKAEFRQREDFKNELR

SEQ ID NO: 360 - protein, 987 aa, Campylobacter jejuni
MARILAFDIGISSIGWAFSENDELKDCGVRIFTKAENPKTGESLALPRRLARSARKRLARRKARLNHLKHLIANEFKLNYEDYQSFDESLAKAYKGSLISPYELRFRALNELLSKQDFARVILHIAKRRGYDNIKNSDNEEKSEILKAIKQNEEKLVNYQSVGEYLYKEYFQKFKENSKEFINVRNKKESYERCIAQSFLKDELKLIFQKQREFGLSFSKKFEEEVLSVAFYKRALKDFSHLVGNCSFFTDEKRAPKNSPLAFMFVALTRIINLLNNLKNTEGILYTKDDLNTLLNEVLKNGTLTYKQTKKLLGLSDDYEFKGEKGTYFIEFKKYKEFIKALGDHSLSQDDLNEIAKDITLIKDEIKLKKALAKYDLNQNQIDSLSKLEFKDHLNISFKALKLITPLMLEGKKYDEACNELNLKVVINEDKKDFLPAFNETYYKDEVTNPVVLRAIKEYRKVLNALLKKYGKVHKINIELAREVGKNHSQRAKIEKEQNENYKAKKDAELECEKLGLKINNKNILKLRLFKEQKEFCAYSGEKIKLSDLQDEKMLEIDHIYPYSRSFDDSYMNKVLVFTKQNQEKLNKTPFEAFGNDSTKWQKIEVLAKNLPTKKQKRILDKNYKDKEQKDFKDRNLNDTRYIARLVLNYTKDYLDFLPLSDDENTKLNDIQKGSKVHVEAKSGMLTSALRHTWGFSTKDRNNHLHHAIDAVIIAYANNSIVKAFSDFKKEQESNSAELYAKKISELDYKNKRKFFEPFSGFRQKVLDKIDEIFVSKPERKKPSGALHEETFRKEEEFYQSYGGKEGVLKALELGKIRKVNGKIVKNGDMFRVDIFKHKKTNKFYAVPIYTMDFALKVLPNKAVVQGKDKKSGLIKDWILMDENYEFCFSLYKDSLILIQTKDMQEPEFVYYNAFTSSTVSLIVSKHDNKFETLSKNQKILFKNANEKEVIAKSIGIQNLKVFEKYIVSALGEVTKAEFRQREDFKK

SEQ ID NO: 361 - protein, 984 aa, Campylobacter jejuni
MARILAFDIGISSIGWAFSENDELKDCGVRIFTKAENPKTGESLALPRRLARSARKRLARRKARLNHLKHLIANEFKLNYEDYQSFDESLAKAYKGSLISPYELRFRALNELLSKQDFARVILHIVKRRGYDDIKNSDDKEKGAILKAIKQNEEKLANYQSVGEYLYKEYFQKFKENSKEFTNVRNKKESYERCIAQSFLKDELKLIFKKQREFGFSFSKKFEEEVLSVAFYKRALKDFSHLVGNCSFFTDEKRAPKNSPLAFMFVALTRIINLLNNLKNTEGILYTKDDLNTLLNEVLKNGTLTYKQTKKLLGLSDDYEFKGEKGTYFIEFKKYKEFIKALGDHSLSQDDLNEIAKDITLIKDEIKLKKALAKYDLNQNQIDSLSKLEFKDHLNISFKALKLITPLMLEGKKYDEACNELNLKVAINEDKKDFLPAFNETYYKDEVTNPVVLRAIKEYRKVLNALLKKYGKVHKINIELAREVGKNHSQRAKIEKEQNENYKAKKDAEFECEKLGLKINSKNILKLRLFKEQKEFCAYSGEKIKISDLQDEKMLEIDHIYPYSRSFDDSYMNKVLVFTKQNQEKLNKTPFEAFGNDSAKWQKIEVLAKNLPTKKQKRILDKNYKDKEQKDFKDRNLNDTRYIARLVLNYTKDYLDFLPLSDDENTKLNDTQKGSKVHVEAKSGMLTSALRHTWGFSTKDRNNHLHHAIDAVIIAYANNSIVKAFSDFKKEQESNSAELYAKKISELDYKNKRKFFEPFSGFRQKVLDKIDEIFVSKPERKKPSGALHEETFRKEEEFYQSYGGKEGVLKALELGKIRKVNGKIVKNGDMFRVDIFKHKKTNKFYAVPIYTMDFALKVLPNKAVARSKKGEIKDWILMDENYEFCFSLYKDSLILIQTKDMQEPEFVYYNAFTSSTVSLIVSKHDNKFETLSKNQKILFKNANEKEVIAKSIGIQNLKVFEKYIVSALGEVTKAEFRQREDFKK

SEQ ID NO: 362 - protein, 984 aa, Campylobacter jejuni
MARILAFDIGISSIGWAFSENDELKDCGVRIFTKAENPKTGESLALPRRLARSARKRLARRKARLNHLKHLIANEFKLNYEDYQSFDESLAKAYKGSLISPYELRFRALNELLSKQDFARVILHIVKRRGYDDIKNSDDKEKGTILKAIKQNEEKLANYQSVGEYLYKEYFQKFKENSKEFTNVRNKKESYERCIAQSFLKDELKLIFKKQREFGFSFSKKFEEEVLSVAFYKRALKDFSHLVGNCSFFTDEKRAPKNSPLAFMFVALTRIINLLNNLKNTEGILYTKDDLNTLLNEVLKNGTLTYKQTKKLLGLSDDYEFKGEKGTYFIEFKKYKEFIKALGEHNLSQDDLNEIAKDITLIKDEIKLKKALAKYDLNQNQIDSLSKLEFKDHLNISFKALKLITPLMLEGKKYDEACNELNLKVAINEDKKDFLPAFNETYYKDEVTNPVVLRAIKEYRKVLNALLKKYGKVHKINIELAREVGKNYSQRAKIEKEQNENYKAKKDAELECEKLGLKINSKNILKLRLFKEQKEFCAYSGEKIKISDLQDEKMLEIDHIYPYSRSFDDSYMNKVLVFTKQNQEKLNQTPFEAFGNDSAKWQKIEVLAKNLPTKKQKRILDKNYKDKEQKDFKDRNLNDTRYIARLVLNYTKDYLDFLPLSDDENTKLNDTQKGSKVHVEAKSGMLTSALRHTWGFSAKDRNNHLHHAIDAVIIAYANNSIVKAFSDFKKEQESNSAELYAKKISELDYKNKRKFFEPFSGFRQKVLDKIDEIFVSKPERKKPSGALHEETFRKEEEFYQSYGGKEGVLKALELGKIRKVNGKIVKNGDMFRVDIFKHKKTNKFYAVPIYTMDFALKVLPNKAVARSKKGEIKDWILMDENYEFCFSLYKDSLILIQTKDMQEPEFVYYNAFTSSTVSLIVSKHDNKFETLSKNQKILFKNANEKEVIAKSIGIQNLKVFEKYIVSALGEVTKAEFRQREDFKK

SEQ ID NO: 363 - protein, 987 aa, Campylobacter jejuni
MARILAFDIGISSIGWAFSENDELKDCGVRIFTKAENPKTGESLALPRRLARSARKRLARRKARLNHLKHLIANEFKLNYEDYQSFNESLAKAYKGSLISPYELRFRALNELLSKQDFARVILHIAKRRGYDDIKNSDDKEKGAILKVIKQNEEKLANYQSVGEYLYKEYFQKFKENSKEFTNVRNKKESYERCIAQSFLKDELKLIFQKQREFGFSFSKKFEEEVLSVAFYKRALKDFSHLVGNCSFFTDEKRAPKNSPLAFMFVALTRIINLLNNLKNTEGILYTKDDLNALLNEVLKNGTLTYKQTKKLLGLSDDYEFKGEKGTYFIEFKKYKEFIKALGDHSLSQDDLNEIAKDITLIKDEIKLKKALAKYDLNQNQIDSLSKLEFKDHLNISFKALKLITPLMLEGKKYDEACNELNLKVAINEDKKDFLPAFNETYYKDEVTNPVVLRAIKEYRKVLNALLKKYGKVHKINIELAREVGKNYSQRAKIEKEQNENYKAKKDAELECEKLGLKINSKNILKLRLFKEQKEFCAYSGEKIKISDLQDEKMLEIDHIYPYSRSFDDSYMNKVLVFTKQNQEKLNQTPFEAFGNDSAKWQKIEVLAKNLPTKKQKRILDKNYKDKEQKDFKDRNLNDTRYIARLVLNYTKDYLDFLPLSDDENTKLNDTQKGSKVHVEAKSGMLTSALRHTWGFSAKDRNNHLHHAIDAVIIAYANNSIVKAFSDFKKEQESNSAELYAKKISELDYKNKRKFFEPFSGFRQKVLDKIDEIFVSKPERKKPSGALHEETFRKEEEFYQSYGGKEGVLKALELGKIRKVNGKIVKNGDMFRVDIFKHKKTNKFYAVPIYTMDFALKVLPNKAVARSKKGEIKDWILMDENYEFCFSLYKDSLILIQTKDMQEPELVYFNAFTSSTVSLIVSKHDNKFETLSKNQKILFKNANEKEVIAKSIGIQNLKVFEKYIVSALGEVTKAEFRQREDFKNELR

SEQ ID NO: 364 - protein, 984 aa, Campylobacter jejuni
MARILAFDIGISSIGWAFSENDELKDCGVRIFTKAENPKTGESLALPRRLARSARKRLARRKARLNRLKHLIANEFKLNYEDYQSFDESLAKAYKGSLISPYELRFRALNELLSKQDFARVILHIAKRRGYDDIKNSDDKEKGAILKAIKQNEEKLANYQSVGEYLYKEYFQKFKENSKEFTNVRNKKESYERCIAQSFLKDELKLIFKKQREFGFSFSKKFEEEVLSVAFYKRALKDFSHLVGNCSFFTDEKRAPKNSPLAFMFVALTRIINLLNNLKNTEGILYTKDDLNALLNEVLKNGTLTYKQTKKLLGLSDDYEFKGEKGTYFIEFKKYKEFIKALGDHSLNQDDLNEIAKDITLIKDEIKLKKALAKYDLNQNQIDSLSKLEFKDHLNISFKALKLITPLMLEGKKYDEACNELNLKVAINEDKKDFLPAFNETYYKDEVTNPVVLRAIKEYRKVLNALLKKYGKVHKINIELAREVGKNYSQRAKIEKEQNENYKAKKDAELECEKLGLKINSKNILKLRLFKEQKEFCVYSGEKIKISDLQDEKMLEIDHIYPYSRSFDDSYMNKVLVFTKQNQEKLNQTPFEAFGNDSAKWQKIEVLAKNLPTKKQKRILDKNYKDKEQKDFKDRNLNDTRYIARLVLNYTKDYLDFLPLSDDENTKLNDTQKGSKVYVEAKSGMLTSALRHTWGFSTKDRNNHLHHAIDAVIIAYANNSIVKAFSDFKKEQESNSAELYAKKISELDYKNKRKFFEPFSGFRQKVLDKIDEIFVSKPERKKPSGALHEETFRKEEEFYQSYGGKEGVLKALELGKIRKVNGKIVKNGDMFRVDIFKHKKTNKFYAVPIYTMDFALKVLPNKAVARSKKGEIKDWILMDENYEFCFSLYKDSLILIQTKDMQEPEFVYYNAFTSSTVSLIVSKHDNKFETLSKNQKILFKNANEKEVIAKSIGIQNLKVFEKYIVSALGEVTKAEFRQREDFKK

SEQ ID NO: 365 - protein, 984 aa, Campylobacter jejuni
MARILAFDIGISSIGWAFSENDELKDCGVRIFTKVENPKTGESLALPRRLARSARKRLARRKARLNHLKHLIANEFKLNYEDYQSFDESLAKAYKGSLISPYELRFRALNELLSKQDFARVILHIAKRRGYDDIKNSDDKEKGAILKAIKQNEEKLANYQSVGEYLYKEYFQKFKENSKEFTNVRNKKESYERCIAQSFLKDELKLIFKKQREFGFSFLKKFEEEVLSVAFYKRALKDFSHLVGNCSFFTDEKRAPKNSPLAFMFVALTRIINLLNNLKNTEGILYTKDDLNALLNEVLKNGTLTYKQTKKLLGLSDDYEFKGEKGTYFIEFKKYKEFIKALGEHNLSQDDLNEIAKDITLIKDEIKLKKALAKYDLNQNQIDSLSKLEFKDHLNISFKALKLITPLMLEGKKYDEAYNELNLKVAINEDKKDFLPAFNETYYKDEVTNPVVLRAIKEYRKVLNALLKKYGKVHKINIELAREVGKNHSQRAKIEKEQNENYKAKKDAELECEKLGLKINSKNILKLRLFKEQKEFCAYSGEKIKISDLQDEKMLEIDHIYPYSRSFDDSYMNKVLVFTKQNQEKLNQTPFEAFGNDSAKWQKIEVLAKNLPTKKQKRILDKNYKDKEQKDFKDRNLNDTRYIARLVLNYTKDYLDFLPLSDDENTKLNDTQKGSKVHVEAKSGMLTSALRHTWGFSAKDRNNHLHHAIDAVIIAYANNSIVKAFSDFKKEQESNSAELYAKKISELDYKNKRKFFEPFSGFRQKVLDKIDEIFVSKPERKKPSGALHEETFRKEEEFYQSYGGKEGVLKALELGKIRKVNGKIVKNGDMFRVDIFKHKKTNKFYAVPIYTMDFALKVLPNKAVARSKKGEIKDWILMDENYEFCFSLYKDSLILIQTKDMQEPELVYFNAFTSSTVSLIVSKHDNKFETLSKNQKILFKNANEKEVIAKSIGIQNLKVFEKYIVSALGEVTKAEFRQREDFKK

SEQ ID NO: 366 - protein, 984 aa, Campylobacter jejuni
MARILAFDIGISSIGWAFSENDELKDCGVRIFTKVENPKTGESLALPRRLARSARKRLARRKARLNHLKHLIANEFKLNYEDYQSFDESLAKAYKGSLISPYELRFRALNELLSKQDFARVILHIAKRRGYDDIKNSDDKEKGAILKAIKQNEEKLANYQSVGEYLYKEYFQKFKENSKEFTNVRNKKESYERCIAQSFLKDELKLIFKKQREFGFSFSKKFEEEVLSVAFYKRALKDFSHLVGNCSFFTDEKRAPKNSPLAFMFVALTRIINLLNNLKNTEGILYTKDDLNALLNEVLKNGTLTYKQTKKLLGLSDDYEFKGEKGTYFIEFKKYKEFIKALGEHNLSQDDLNEIAKDITLIKDEIKLKKALAKYDLNQNQIDSLSKLEFKDHLNISFKALKLITPLMLEGKKYDEACNELNLKVAINEDKKDFLPAFNETYYKDEVTNPVVLRAIKEYRKVLNALLKKYGKVHKINIELAREVGKNHSQRAKIEKEQNENYKAKKDAELECEKLGLKINSKNILKLRLFKEQKEFCAYSGEKIKISDLQDEKMLEIDHIYPYSRSFDDSYMNKVLVFTKQNQEKLNKTPFEAFGNDSAKWQKIEVLAKNLPTKKQKRILDKNYKDKEQKDFKDRNLNDTRYIARLVLNYTKDYLDFLPLSNDENTKLNDTQKGSKVHVEAKSGMLTSALRHTWGFSTKDRNNHLHHAIDAVIIAYANNSIVKAFSDFKKEQESNSAELYAKKISELDYKNKRKFFEPFSGFRQKVLDKIDEIFVSKPERKKPSGALHEETFRKEEEFYQSYGGKEGVLKALELGKIRKVNGKIVKNGDMFRVDIFKHKKTNKFYAVPIYTMDFALKVLPNKAVARSKKGEIKDWILMDENYEFCFSLYKDSLILIQTKDMQEPEFVYYNAFTSSTVSLIVSKHDNKFETLSKNQKILFKNANEKEVIAKSIGIQNLKVFEKYIVSALGEVTKAEFRQREDFKK

SEQ ID NO: 367 - protein, 984 aa, Campylobacter jejuni
MARILAFDIGISSIGWAFSENDELKDCGVRIFTKVENPKTGESLALPRRLARSARKRLARRKARLNHLKHLIANEFKLNYEDYQSFDESLAKAYKGSLISPYELRFRALNELLSKQDFARVILHIAKRRGYDDIKNSDDKEKGAILKAIKQNEEKLANYQSVGEYLYKEYFQKFKENSKEFTNVRNKKESYERCIAQSFLKDELKLIFKKQREFGFSFSKKFEEEVLSVAFYKRALKDFSHLVGNCSFFTDEKRAPKNSPLAFMFVALTRIINLLNNLKNTEGILYTKDDLNALLNEVLKNGTLTYKQTKKLLGLSDDYEFKGEKGTYFIEFKKYKEFIKALGEHNLSQDDLNEIAKDITLIKDEIKLKKALAKYDLNQNQIDSLSKLEFKDHLNISFKALKLITPLMLEGKKYDEACNELNLKVAINEDKKDFLPAFNETYYKDEVTNPVVLRAIKEYRKVLNALLKKYGKVHKINIELAREVGKNHSQRAKIEKEQNENYKAKKDAELECEKLGLKINSKNILKLRLFKEQKEFCAYSGEKIKISDLQDEKMLEIDHIYPYSRSFDDSYMNKVLVFTKQNQEKLNKTPFEAFGNDSAKWQKIEVLAKNLPTKKQKRILDKNYKDKEQKDFKDRNLNDTRYIARLVLNYTKDYLDFLPLSDDENTKLNDTQKGSKVHVEAKSGMLTSALRHTWGFSTKDRNNHLHHAIDAVIIAYANNSIVKAFSDFKKEQESNSAELYAKKISELDYKNKRKFFEPFSGFRQKVLDKIDEIFVSKPERKKPSGALHEETFRKEEEFYQSYGGKEGVLKALELGKIRKVNGKIVKNGDMFRVDIFKHKKTNKFYAVPIYTMDFALKVLPNKAVARSKKGEIKDWILMDENYEFCFSLYKDSLILIQTKDMQEPEFVYYNAFTSSTVSLIVSKHDNKFETLSKNQKILFKNANEKEVIAKSIGIQNLKVFEKYIVSALGEVTKAEFRQREDFKK

SEQ ID NO: 368 - protein, 984 aa, Campylobacter jejuni
MARILAFDIGISSIGWAFSENDELKDCGVRIFTKVENPKTGESLALPRRLARSARKRLARRKARLNHLKHLIANEFKLNYEDYQSFDESLAKAYKGSLISPYELRFRALNELLSKQDFARVILHIAKRRGYDDIKNSDDKEKGAILKAIKQNEEKLANYQSVGEYLYKEYFQKFKENSKEFTNVRNKKESYERCIAQSFLKDELKLIFKKQREFGFSFSKKFEEEVLSVAFYKRALKDFSHLVGNCSFFTDEKRAPKNSPLAFMFVTLTRIINLLNNLKNTEGILYTKDDLNALLNEVLKNGTLTYKQTKKLLGLSDDYEFKGEKGTYFIEFKKYKEFIKALGEHNLSQDDLNEIAKDITLIKDEIKLKKALAKYDLNQNQIDSLSKLEFKDHLNISFKALKLITPLMLEGKKYDEACNELNLKVAINEDKKDFLPAFNETYYKDEVTNPVVLRAIKEYRKVLNALLKKYGKVHKINIELAREVGKNHSQRAKIEKEQNENYKAKKDAELECEKLGLKINSKNILKLRLFKEQKEFCAYSGEKIKISDLQDEKMLEIDHIYPYSRSFDDSYMNKVLVFTKQNQEKLNKTPFEAFGNDSAKWQKIEVLAKNLPTKKQKRILDKNYKDKEQKDFKDRNLNDTRYIARLVLNYTKDYLDFLPLSDDENTKLNDTQKGSKVHVEAKSGMLTSALRHTWGFSTKDRNNHLHHAIDAVIIAYANNSIVKAFSDFKKEQESNSAELYAKKISELDYKNKRKFFEPFSGFRQKVLDKIDEIFVSKPERKKPSGALHEETFRKEEEFYQSYGGKEGVLKALELGKIRKVNGKIVKNGDMFRVDIFKHKKTNKFYAVPIYTMDFALKVLPNKAVARSKKGEIKDWILMDENYEFCFSLYKDSLILIQTKDMQEPEFVYYNAFTSSTVSLIVSKHDNKFETLSKNQKILFKNANEKEVIAKSIGIQNLKVFEKYIVSALGEVTKAEFRQREDFKK

SEQ ID NO: 369 - protein, 984 aa, Campylobacter jejuni
MARILAFDIGISSIGWAFSENDELKDCGVRIFTKVENPKTGESLALPRRLARSARKRLARRKARLNHLKHLIANEFKLNYEDYQSFDESLAKAYKGSLISPYELRFRALNELLSKQDFARVILHIAKRRGYDDIKNSDDKEKGAILKAIKQNEEKLANYQSVGEYLYKEYFQKFKENSKEFTNVRNKKESYERCIAQSFLKDELKLIFKKQREFGFSFSKKFEEEVLSVAFYKRALKDFSHLVGNCSFFTDEKRAPKNSPLAFMFVALTRIINLLNNLKNTEGILYTKDDLNALLNEVLKNGTLTYKQTKKLLGLSDDYEFKGEKGTYFIEFKKYKEFIKALGEHNLSQDDLNEIAKDITLIKDEIKLKKALAKYDLNQNQIDSLSKLEFKDHLNISFKALKLITPLMLEGKKYDEACNELNLKVAINEDKKDFLPAFNETYYKDEVTNPVVLRAIKEYRKVLNALLKKYGKVHKINIELAREVGKNHSQRAKIEKEQNENYKAKKDAELECEKLGLKINSKNILKLRLFKEQKEFCAYSGEKIKISDLQDEKMLEIDHIYPYSRSFDDSYMNKVLVFTKQNQEKLNKTPFEAFGNDSAKWQKIEVLAKNLPTKKQKRILDKNYKDKEQKDFKDRNLNDTRYIARLVLNYTKDYLDFLPLSDDENTKLNDTQKGSKVHVEAKSGMLTSALRHTWGFSTKDRNNHLHHAIDAVIIAYANNSIVKAFSDFKKEQESNSAELYAKKISELDYKNKRKFFEPFSGFRQKVLDKIDEIFVSKPERKKPSGALHEETFRKEEEFYQSYGGKEGVLKALELGKIRKVNGKIVKNGDMFRVDIFKHKKTNKFYAVPIYTMDFALKVLPNKAVARSKKGEIKDWILMDENYEFCFSLYKDSLILIQTKDMQEPEFVYYNAFTSSTVSLIVSKHDNKFETLSKNQKILFKNANEKEVIAKSIGIQNLKVFEKYIVSALGEVTKAEFIQREDFKK

SEQ ID NO: 370 - protein, 987 aa, Campylobacter jejuni
MARILAFDIGISSIGWAFSENDELKDCGVRIFTKVENPKTGESLALPRRLARSARKRLARRKARLNHLKHLIANEFKLNYEDYQSFDESLAKAYKGSLISPYELRFRALNELLSKQDFARVILHIAKRRGYDDIKNSDDKEKGAILKAIKQNEEKLANYQSVGEYLYKEYFQKFKENSKEFTNVRNKKESYERCIAQSFLKDELKLIFKKQREFGFSFSKKFEEEVLSVAFYKRALKDFSHLVGNCSFFTDEKRVPKNSPLAFMFVALTRIINLLNNLKNTEGILYTKDDLNALLNEVLKNGTLTYKQTKKLLGLSDDYEFKGEKGTYFIEFKKYKEFIKALGEHNLSQDDLNEIAKDITLIKDEIKLKKALAKYDLNQNQIDSLSKLEFKDHLNISFKALKLITPLMLEGKKYDEACNELNLKVAINEDKKDFLPAFNETYYKDEVTNPVVLRAIKEYRKVLNALLKKYGKVHKINIELAREVGKNHSQRAKIEKEQNENYKAKKDAELECEKLGLKINSKNILKLRLFKEQKEFCAYSGEKIKISDLQDEKMLEIDHIYPYSRSFDDSYMNKVLVFTKQNQEKLNQTPFEAFGNDSAKWQKIEVLAKNLPTKKQKRILDKNYKDKEQKNFKDRNLNDTRYIARLVLNYTKDYLDFLPLSDDENTKLNDTQKGSKVHVEAKSGMLTSALRHTWGFSAKDRNNHLHHAIDAVIIAYANNSIVKAFSDFKKEQESNSAELYAKKISELDYKNKRKFFEPFSGFRQKVLDKIDEIFVSKPERKKPSGALHEETFRKEEEFYQSYGGKEGVLKALELGKIRKVNGKIVKNGDMFRVDIFKHKKTNKFYGVPIYTMDFALKVLPNKAVARSKKGEIKDWILMDENYEFCFSLYKDSLILIQTKDMQEPEFVYYNAFTSSTVSLIVSKHDNKFETLSKNQKILFKNANEKEVIAKSIGIQNLKVFEKYIVSALGEVTKAEFRQREDFKNELR

SEQ ID NO: 371 - protein, 984 aa, Campylobacter jejuni
MARILAFDIGISSIGWAFSENDELKDCGVRIFTKVENPKTGESLALPRRLARSARKRLARRKVRLNHLKHLIANEFKLNYEDYQSFDESLAKAYKGSLISPYELRFRALNELLSKQDFARVILHIAKRRGYDDIKNSDDKEKGAILKAIKQNEEKLANYQSVGEYLYKEYFQKFKENSKEFTNVRNKKESYERCIAQSFLKDELKLIFKKQREFGFSFSKKFEEEVLSVAFYKRALKDFSHLVGNCSFFTDEKRAPKNSPLAFMFVALTRIINLLNNLKNTEGILYTKDDLNALLNEVLKNGTLTYKQTKKLLGLSDDYEFKGEKGTYFIEFKKYKEFIKALGEHNLSQDDLNEIAKDITLIKDEIKLKKALAKYDLNQNQIDSLSKLEFKDHLNISFKALKLITPLMLEGKKYDEACNELNLKVAINEDKKDFLPAFNETYYKDEVTNPVVLRAIKEYRKVLNALLKKYGKVHKINIELAREVGKNHSQRAKIEKEQNENYKAKKDAELECEKLGLKINSKNILKLRLFKEQKEFCAYSGEKIKISDLQDEKMLEIDHIYPYSRSFDDSYMNKVLVFTKQNQEKLNKTPFEAFGNDSAKWQKIEVLAKNLPTKKQKRILDKNYKDKEQKDFKDRNLNDTRYIARLVLNYTKDYLDFLPLSDDENTKLNDTQKGSKVHVEAKSGMLTSALRHTWGFSTKDRNNHLHHAIDAVIIAYANNSIVKAFSDFKKEQESNSAELYAKKISELDYKNKRKFFEPFSGFRQKVLDKIDEIFVSKPERKKPSGALHEETFRKEEEFYQSYGGKEGVLKALELGKIRKVNGKIVKNGDMFRVDIFKHKKTNKFYAVPIYTMDFALKVLPNKAVARSKKGEIKDWILMDENYEFCFSLYKDSLILIQTKDMQEPEFVYYNAFTSSTVSLIVSKHDNKFETLSKNQKILFKNANEKEVIAKSIGIQNLKVFEKYIVSALGEVTKAEFRQREDFKK

SEQ ID NO: 372 - protein, 721 aa, Campylobacter jejuni
MFVALTRIINLLNNLKNTEGILYTKDDLNTLLNEVLKNGTLTYKQTKKLLGLSDDYEFKGEKGTYFIEFKKYKEFIKALGDHSLSQDDLNEIAKDITLIKDEIKLKKALAKYDLNQNQIDSLSKLEFKDHLNISFKALKLITPLMLEGKKYDEACNELNLKVAINEDKKDFLPAFNETYYKDEVTNPVVLRAIKEYRKVLNALLKKYGKVHKINIELAREVGKNYSQRAKIEKEQNENYKAKKDAELECEKLGLKINSKNILKLRLFKEQKEFCAYSGEKIKISDLQDEKMLEIDHIYPYSRSFDDSYMNKVLVFTKQNQEKLNQTPFEAFGNDSAKWQKIEVLAKNLPTKKQKRILDKNYKDKEQKDFKDRNLNDTRYIARLVLNYTKDYLDFLPLSDDENTKLNNTQKGSKVYVEAKSGMLTSALRHTWGFSTKDRNNHLHHAIDAVIIAYANNSIVKAFSDFKKEQESNSAELYAKKISELDYKNKRKFFEPFSGFRQKVLDKIDEIFVSKPERKKPSGALHEETFRKEEEFYQSYGGKEGVLKALELGKIRKVNGKIVKNGDMFRVDIFKHKKTNKFYAVPIYTMDFALKVLPNKAVARSKKGEIKDWILMDENYEFCFSLYKDSLILIQTKDMQEPEFVYYNAFTSSTVSLIVSKHDNKFETLSKNQKILFKNANEKEVIAKSIGIQNLKVFEKYIVSALGEVTKAEFRQREDFKK

SEQ ID NO: 373 - protein, 512 aa, Campylobacter jejuni
MHKINIELAREVGKNHSQRAKIEKEQNENYKAKKDAEIECEKLGLKINSKNILKLRLFKEQKEFCAYSGEKIKLSDLQDEKMLEIDHIYPYSRSFDDSYMNKVLVFTKQNQEKLNKTPFEAFGNDSTKWQKIEVLAKNLPEKKQKRILDKNYKDKEQKDFKDRNLNDTRYIARLVLNYTKDYLDFLPLSDDENTKLNDTQKGSKVHVEAKSGMLTSALRHTWGFSAKDRNNHLHHAIDAAIIAYANNSIVKAFSDFKKEQESNSVELYAKKISELDYKNKRKFFEPFSGFRQKVLDKIDEIFVSKPERKKPSGALHEETFRKEEEFYQSYGGKEGVLKALELGKIRKVNGKIVKNGDMFRVDIFKHKKTNKFYAVPIYTMDFALKVLPNKAVARSKKGEIKDWILMDENYEFCFSLYKDSLILIQTKDMQEPELVYFNAFTSSTVSLIVSKHDNKFETLSKNQKILFKNANEKEVIAKSIGIQNLKVFEKYIVSALGEVTKAEFRQREDFKK

SEQ ID NO: 374 - protein, 965 aa, Campylobacter jejuni
MKIIGFNLGIANIGWALRENDEIIDCGVRVFDIPENPKNGNSLALERRENKARMKIVKRKKARMLATKTFLKKELNVDLSKLFLIGSTQSIYELRAKALSSLISKEELSAIILHIAKHRGYDDSALKNENGTIIEALNKNKETMLKFKSVGEYFYKNFVQNKEVKKIRNTTEDYSNSVPRSLLKQELDLILDKQKELGLIKNADFKEKLFEIIFFKRPLKDFSNKIGNCIFFENEKRAAKNTISACEFVALGKVVNLLKSIEKDIGIVYEKDSINEIMSIILDKTSISYKKIRDILNLPQEINFKGLDYSKNNVENSKLVDLKKLNEFKKALGDGFANLDKDILDSIATDITLTKDTATLKEKLKNYNVLNAEQIEKLSELVFNDHINLSLKALKQIIPLMYEGKRYDEACELCNFTIAKNQEKSEYLPLFEKTRFAKDISSPVVIRAICEFRKLLNDIIRRYGSVHKIHLELTRDFGISFSDRKKIIKEIEQNEQSRIKALETIKELKLEETSKNIQIVRLFEDQKGICPYSGLKMDLNRLDELVIDYIRPYNRSLDDSYSNKVLTFKKLSDLKQGKTPFEAFGEDEKLWAEINERIKEYNGKKRFKIFDKFFKDKKPFDFTEQTLQDTRWLTKLVASYLNEYLSFLPISEDENTALGYGEKGSKQHVILSSGMITQMLRNFWYLGFKNHKDYKNNAMDAIIVAFTTNSIIFAFNNFKKELDLAKAEFYANKISESDYLLKRKFLPPFSGFKEQALEKVKNIFVSHSLKIKNKGTLHDLTPLKIKELKNTYGDLDLAVKLGKIRKYNDKYYANANGSLVRADLFVDKKNKFHAVSIYKADFSTKKLPNKTPATTSNGETKEGIEMNENYNFCMSLYKNTPISVKIKGMKEPIICYYHGFNTSGSKITYKKHDNNYHNLSEDEMVVFRKNDKESIAVGKILEIKKYSISPSGELSLIENEERKWF

SEQ ID NO: 375 - protein, 759 aa, Campylobacter jejuni
MLSVAFYKRALKDFSHLVGNCSFFTDEKRAPKNSPLAFMFVALTRIINLLNNLKNTEGILYTKDDLNALLNEVLKNGTLTYKQTKKLLGLSDDYEFKGEKGTYFIEFKKYKEFIKALGEHNLSQDDLNEIAKDITLIKDEIKLKKALAKYDLNQNQIDSLSKLEFKDHLNISFKALKLITPLMLEGKKYDEACNELNLKVAINEDKKDFLPAFNETYYKDEVTNPVVLRAIKEYRKVLNALLKKYGKVHKINIELAREVGKNHSQRAKIEKEQNENYKAKKDAELECEKLGLKINSKNILKLRLFKEQKEFCAYSGEKIKISDLQDEKMLEIDHIYPYSRSFDDSYMNKVLVFTKQNQEKLNKTPFEAFGNDSAKWQKIEVLAKNLPTKKQKRILDKNYKDKEQKDFKDRNLNDTRYIARLVLNYTKDYLDFLPLSDDENTKLNDTQKGSKVHVEAKSGMLTSALRHTWGFSTKDRNNHLHHAIDAVIIAYANNSIVKAFSDFKKEQESNSAELYAKKISELDYKNKRKFFESFSGFRQKVLDKIDEIFVSKPERKKPSGALHEETFRKEEEFYQSYGGKEGVLKALELGKIRKVNGKIVKNGDMFRVDIFKHKKTNKFYAVPIYTMDFALKVLPNKAVARSKKGEIKDWILMDENYEFCFSLYKDSLILIQTKDMQEPEFVYYNAFTSSTVSLIVSKHDNKFETLSKNQKILFKNANEKEVIAKSIGIQNLKVFEKYIVSALGEVTKAEFRQREDFKK

SEQ ID NO: 376 - protein, 984 aa, Campylobacter jejuni
MVRILAFDIGISSIGWAFSENDELKDCGVRIFTKVENPKTGESLALPRRLARSARKRLARRKARLNHLKHLIANEFKLNYEDYQSFDESLAKAYKGSLISPYELRFRALNELLSKQDFARVILHIAKRRGYDDIKNSDDKEKGAILKAIKQNEEKLANYQSVGEYLYKEYFQKFKENSKEFTNVRNKKESYERCIAQSFLKDELKLIFKKQREFGFSFSKKFEEEVLSVAFYKRALKDFSHLVGNCSFFTDEKRAPKNSPLAFMFVALTRIINLLNNLKNTEGILYTKDDLNALLNEVLKNGTLTYKQTKKLLGLSDDYEFKGEKGTYFIEFKKYKEFIKALGEHNLSQDDLNEIAKDITLIKDEIKLKKALAKYDLNQNQIDSLSKLEFKDHLNISFKALKLITPLMLEGKKYDEACNELNLKVAINEDKKDFLPAFNETYYKDEVTNPVVLRAIKEYRKVLNALLKKYGKVHKINIELAREVGKNHSQRAKIEKEQNENYKAKKDAELECEKLGLKINSKNILKLRLFKEQKEFCAYSGEKIKISDLQDEKMLEIDHIYPYSRSFDDSYMNKVLVFTKQNQEKLNKTPFEAFGNDSAKWQKIEVLAKNLPTKKQKRILDKNYKDKEQKDFKDRNLNDTRYIARLVLNYTKDYLDFLPLSDDENTKLNDTQKGSKVHVEAKSGMLTSALRHTWGFSTKDRNNHLHHAIDAVIIAYANNSIVKAFSDFKKEQESNSAELYAKKISELDYKNKRKFFEPFSGFRQKVLDKIDEIFVSKPERKKPSGALHEETFRKEEEFYQSYGGKEGVLKALELGKIRKVNGKIVKNGDMFRVDIFKHKKTNKFYAVPIYTMDFALKVLPNKAVARSKKGEIKDWILMDENYEFCFSLYKDSLILIQTKDMQEPEFVYYNAFTSSTVSLIVSKHDNKFETLSKNQKILFKNANEKEVIAKSIGIQNLKVFEKYIVSALGEVTKAEFRQREDFKK

SEQ ID NO: 377 - protein, 1003 aa, Campylobacter lari]
MRILGFDIGINSIGWAFVENDELKDCGVRIFTKAENPKNKESLALPRRNARSSRRRLKRRKARLIAIKRILAKELKLNYKDYVAADGELPKAYEGSLASVYELRYKALTQNLETKDLARVILHIAKHRGYMNKNEKKSNDAKKGKILSALKNNALKLENYQSVGEYFYKEFFQKYKKNTKNFIKIRNTKDNYNNCVLSSDLEKELKLILEKQKEFGYNYSEDFINEILKVAFFQRPLKDFSHLVGACTFFEEEKRACKNSYSAWEFVALTKIINEIKSLEKISGEIVPTQTINEVLNLILDKGSITYKKFRSCINLHESISFKSLKYDKENAENAKLIDFRKLVEFKKALGVHSLSRQELDQISTHITLIKDNVKLKTVLEKYNLSNEQINNLLEIEFNDYINLSFKALGMILPLMREGKRYDEACEIANLKPKTVDEKKDFLPAFCDSIFAHELSNPVVNRAISEYRKVLNALLKKYGKVHKIHLELARDVGLSKKAREKIEKEQKENQAVNAWALKECENIGLKASAKNILKLKLWKEQKEICIYSGNKISIEHLKDEKALEVDHIYPYSRSFDDSFINKVLVFTKENQEKLNKTPFEAFGKNIEKWSKIQTLAQNLPYKKKNKILDENFKDKQQEDFISRNLNDTRYIATLIAKYTKEYLNFLLLSENENANLKSGEKGSKIHVQTISGMLTSVLRHTWGFDKKDRNNHLHHALDAIIVAYSTNSIIKAFSDFRKNQELLKARFYAKELTSDNYKHQVKFFEPFKSFREKILSKIDEIFVSKPPRKRARRALHKDTFHSENKIIDKCSYNSKEGLQIALSCGRVRKIGTKYVENDTIVRVDIFKKQNKFYAIPIYAMDFALGILPNKIVITGKDKNNNPKQWQTIDESYEFCFSLYKNDLILLQKKNMQEPEFAYYNDFSISTSSICVEKHDNKFENLTSNQKLLFSNAKEGSVKVESLGIQNLKVFEKYIITPLGDKIKADFQPRENISLKTSKKYGLR

SEQ ID NO: 378 - protein, 372 aa, candidate division
DNESAINQIAYILTTQKADEGIRAELDSLPLSDKAKKAIVKIKPTNFKAFGHLSIKALQKITPHILEGMTYDKACEAAGYDFKKQSASLEQITNPVVKRAITQTLKVVRAIERKYGKPYFIKVETARDLAKNFKDRNAIKKENEENQGYNEDIKSIITNGYEASPKTKGGKQLLNHLKEFNVRLNKNADFNGQQIIKVKLYREQQGKCLYSGNPIDFETMLRDDNAYQVDHIVPFSRSNNDGITNKVLVFTEENQKKADRTPFEYFGTDERRWEKFVALVETTYKTRDVKTSDKATNAINYEYNGYAMKKKQNLLLQDYKNDSWNVRALNDTRYITRFIQNYLRQNVDFAEGEEKQRIIAPNGTTTAYLRKR

SEQ ID NO: 379 - protein, 1117 aa, Capnocytophaga ochracea
MKHILGLDLGSNSIGWAFVQQDFENKQGKIIATGSRIIPMDQGILGDFERGNTVSQTAERTTYRSMRRLRERHLLRRERLHRVLHLLGFLPPHYDAQIDFTKRYGKFIDNAEPKIAYNNGNFIFMNSFNEMVEDFKKHQPQLFYKKSNGEESRIPYDWTIYYLRKKALSQKITQQELAWLILHFNQKRGYYQLRGEEETENPNKEVAFHSLKVVDVEAEAPNKKGEIWYTIRLENGWIYRRTSKNPLDDWKGKTRDFIVTTDLNDDGTIKLDKEGKEKRSFRAPDENDWNLLKKKTEHDIDFSGKPVGTYIYDHLLQNPNQKIKGKLVRTIERKYYKDELKAILAKQIALQPELFTETLLADCIRELYRKNETQQQNLLSKDFLHLFVEDIIFYQRPLCSKKSTIANCTLEKRSYIDKETNERKDAPIKVCAKSNPYYQEFRVLQWLQNLRIYEIETDREVTAEFIETPQDYEALFNFLMSQKEIDNEGLLKYFLFAKNPQIKDKAAKSELKKWLTTYRWNYVYDAADNSSKKYPMNETGYELQRYLQKVEGLPANFLTFDITYQLWHLLYSVKDKVEFEKALKKFAKKKQLDKTSFVDSFKNFKPYPNEYGSFSEKAIKKLLPLMRFGNHWDFNRIDVSTQKRIDDLINGVANEDIRTIIREKAEKYQLNSETCFQDLPLWLAQYVVYNRHAEATDIEKWTSVSDLEAYLEDFKQHSLRNPIVEQVVTETLRVVRDIWQQYSGGQANFFDEIHIELGRELKKTAEERKQLSDKNQENENTNLRIKKLLAELKEDASIQNVRPYSLVQQELLKIYEEGVFSSTDEIEEDIQKIRKKVEPTPPEIQRYKLWLEQKYKSPYTGEVISLTKLFTEEYEIEHIIPQSRYYDDSLSNKVICESAVNKLKTNQLGLEFIQNHHGEKVRITANKEVTIFTEEQYKEFVKKHYANNSAKQQKLLLNEIPEKMVARQLNDTRYISKCISEILSKIVRSDEKDEGVNSKNIIPCTGKITTALKQDWGLNDVWNELILPRFERMNQLTQTQLFTSYNDRLQKNLPTVPIEYSQGFQKKRIDHRHHAMDALVIACATREHINYMNNQHALDKSKDKKEKQQSRIDLHPL

SEQ ID NO: 380 - protein, 303 aa, Capnocytophaga ochracea
MSFKQNLRVINKATNYYEKWEEKNGVLVKKKVKQEGTNWAIRKPLHKETVSGKIVLDRKIGKDKILTATRKAVDITFTEKIISSITDTGIQKILLNYLKYKGSPEVAFSAEGLEELNKNIAQYNDGKKHQPIYKVRIFEEGSKFPLGETGAKATKYVEAAKGTNLFFGVYQGKEKRTYATIPLNEVIERQKQGLPSVPERNEKGEPLLFSLSPNDLVYVPMEGEIAETIDFNNLSKEQKERIYKTVSFTGNQCFFVQEAVASPIVNKMEYSPLNKMERDILGIMIKEVCVKLKVDRLGNIIKA

SEQ ID NO: 381 - protein, 1471 aa, Capnocytophaga sp.
MCKYFYIKNFITFVLSKSIIPMKHILGLDLGSNSIGWAFVQQDFENKQGKIIATGSRIIPMDQGILGDFERGNTVSQTAERTTYRSTRRLRERHLLRRERLHRVLHILGFLPPHYDAQIDFTKRYGKFIDNAEPKIAYNNGNFIFMNSFNEMIEDFKKHQPQLFYKKSNGEESKIPYDWTIYYLRKKALSQKITQQELAWLILHFNQKRGYYQLRGEEETENPNKEVAFHSLKVVDVEAEAPNKKGEIWYTIRLENGWIYRRTSKIPLDDWKGKTRDFIVTTDLNDDGTIKVDKEGKEKRSFRAPDENDWNLLKKKTEHDIDFSGKTVGAYIYDHLLQNPNQKIKGKLVRTIERKYYKDELKAILAKQIALQPELFTETLLADCIRELYRKNETQQQNLLSKDFLHLFVEDIIFYQRPLRSKKSTIANCTLEKRSYIDKETNERKDAPIKVCAKSNPYYQEFRVLQWLQNLRIYEIETDREVTAEFIETPQDCEALFNFLMSQKEIDNKGLLKYFLFAKNPQIKDKAAKSELKKWLTTYRWNYVYDAADNSSKKYPMNETGYELQRYLQKVEGLPANFLTFDITYQLWHLLYSVKDKVEFEKALKKFAKKKQLDKTSFVDSFKNFKPYPNEYGSFSEKAIKKLLPLMRFGNHWDFNRIDVSTQKRIDDLINGVANEDIRTIIREKAEKYQLNSETCFQDLPLWLAQYVVYNRHAEATDIEKWTSVSDLEAYLEDFKQHSLRNPIVEQVVTETLRVVRDIWQQYGGGQANFFDEIHIELGRELKKTAEERKQLSDKNQENESTNLRIKKLLAELKEDASIQNVRPYSLVQQELLKIYEEGVFSATDEVEEDIQKIRKKAEPSKADLQRYKLWLEQKYKSPYTGEVISLTKLFTEEYEIEHIIPQSRYYDDSLSNKVICESAVNKLKTNQLGLEFIQNHHGEKVRITANKEVTIFTEEQYKEFVKKHYANNSAKQQKLLLNEIPEKMVARQLNDTRYISKYISEILSKIVRSDEKDEGVNSKNIIPCTGKITTALKQDWGLNDVWNKLILPRFERMNQLTQTQLFTSYNDRLQKNLPTVPIEYSQGFQKKRIDHRHHAMDALVIACATREHINYMNNQHALDKSKDKKEKQQSRIDLRTILCEKKNNNWQFKKPWSTFTQEAKEALEHIVVSFKQNLRVINKATNYYEKWEEKNGVLVKKKVKQEGTNWAIRKPLHKETVSGKIVLDRKIGKDKILTATRKAVDITFTEKIISSITDTGIQKILLNYLKYKGSPEVAFSTEGLEELNKNIAQYNNGKKHQPIYKVRIFEEGSKFPLGETGAKATKYVEAAKGTNLFFGVYQGKGKRTYATIPLNEVIERQKQGLPSVPERNEKGEPLLFSLSPNDLVYVPMEGEIAETIDFNNLSKEQKERIYKTVSFTGNQCFFVQEAVATPIVNKMEYSPLNKMERDILGTMIKEVCIKLKVDRLGNITKA

SEQ ID NO: 382 - protein, 1450 aa, Capnocytophaga sp.
MKHILGLDLGSNSIGWAFVQQDFENKQGKIIATGSRIIPMDQGILGDFERGNTVSQTAERTTYRNTRRLRERHLLRRERLHRVLHILGFLPPHYDSQIDFTKRYGKFIDNAEPKIAYNNGNFIFMNSFNEMIEDFKKYQPQLFYKKSNGEESKIPYDWTIYYLRKKALSQKITQQELAWLILHFNQKRGYYQLRGEEETENPNKEVAFHSLEVVDVEAEAPNKKGEIWYTIRLENGWIYRRTSKIPLDDWKGKTRDFIVTTDLNDDGTIKLDKEGKEKRSFRAPDENDWNLLKKKTEHDIDFSGKTVGAYIYDHLLQNPNQKIKGKLVRTIERKYYKDELKAILAKQIALQPELFTETLLADCIRELYRKNETQQQNLLSKDFLHLFVEDIIFYQRPLRSKKSTIANCTLEKRSYIDKETNERKDTPIKVCAKSNPYYQEFRVLQWLQNLRIYEIETDREVTAEFIETAQDNEALFNFLMSQKEIDNESLLKYFLFAKNPQIKDKVAKSELKKWLTTYRWNYVYDAADNSSKKYPMNETGYELQQYLQKVEGLPANFLTFDITYRLWHLLYSVKDKVEFEKALKKFAQEYQLDEASFVDSFKNFKPYPNEYGSFSEKAIKKLLPLMRFGNHWDFNRIDVSTQKRIDDLINGVANDEIRTIIREKAEKYQLNSETCFQGLPLWLAQYVVYNRHAEAADIEKWTSVNDLEAYLEDFKQHSLRNPIVEQVITETLRVVRDIWQRYGGGQANFFDEIHIELGRELKKTAEERKQLSNRNQENENTNLRIKKLLAELKEDASIQNVRPYSPVQQELLKIYEEGVFSATDEVEEDIQKIRKKAEPTTPEIQRYKLWLEQKYKSPYTGEVISLTKLFTEEYEIEHIIPQSRYYDDSLSNKVICESAVNKLKTNQLGLEFIQNHHGEKVRITANKEVTIFTEEQYKEFVKKHYANNSAKQQKLLLNEIPEKMVARQLNDTRYISKYISEILSKIVRSDEKDEGVNSKNIIPCTGKITTALKQDWGLNDVWNELILPRFERMNQLTQTQLFTSYNDRFQKNLPTVPIEYSQGFQKKRIDHRHHAMDALVIACATREHINYMNNQHALDKSKDKKEKQQSRIDLRTILCEKKNNNWQFKKPWSTFTQEAQEALEHIVVSFKQNLRVINKATNYYEKWEEKNGVLVKKKVKQEGTNWAIRKPLHKETVSGKIVLDRKIGKDKILTATRKSVDITFTEKIISSITDTGIQKILLNYLKYKGSPEVAFSAEGLEELNKNIAQYNDGKKHQPIYKVRIFEEGSKFPLGETGAKATKYVEAAKGTNLFFGVYQGKGKRTYATIPLNEVIERQKQGLPSVPERNEKGEPLLFSLSPNDLVYVPMEGEIAETIDFNNLSKEQKERIYKTVSFTGNQCFFVQEAVATPIVNKIEYSPLNKMERDILGTMIKEVCIKLKVDRLGNITKA

SEQ ID NO: 383 - protein, 1435 aa, Capnocytophaga sp.
MKNILGLDLGTTSIGFAHIVEDENKEKSEIKELGVRIVSLATDEQSDFEKGKSISTNANRTLKHGARLNLDRYQQRRKFLIDLLQKANLITSASILAENGKNTTHSTWQLRAKAVTERIEKEEFARVLLAINKKRGYKNSRKTKTEDEGQAIDGMAIAKCLYDENLTPGQLSLQLLQQNKKLLPDFYRSDLQKEFDLVWNLQKQFYPDILTDSFYKELQGKGKDATSKAFSKRYHFDTAENKGSKESVRLQAYQWRAEAISKQLSKEEVAYVLTEINNNLNNSSGYLGAISDRSKELYFNRQTVGQYLYAQLQENRHNSLKNKVFYRQDYLDEFERIWETQASFHKELTDELKKQIRDVVIFYQRKLKSQKGLVSFCEFESKEIEIEKDGKAITKSIGARVVPKSSPLFQEFKIWQILNNVTCKRKGIRKKKSSAKSTELDLFNEPSQSIFSLDMECKQLLFDELNLKGDLKSDKVLKLLGYSPQEWEINYNQLEGNRTQKSLYEAYLKIIEIEGYEVKDILQIKSTKDDWSLDESPLSASEIRERVKVIFQTLGICTKILYFDPLLPVKEFEQQYSYQLWHLLYSYESDDSTSGNETLYRILEKKYAFKREHATILANVALQDDYGSLSTKAIRKIYPYIKENQYSTACELAGYKHSKLSLTTEELEARELKNIIPLLKKNALRNPVVEKILNQMINVVNALIEKNSERDAEGKITKYFHFDEIRIELARELKKNAQERYEMTQNINKAKLEHQKISEKLQKQFGIKNPTKSDIIRYRLYQELEHNGYKELYTNTYIAPDVLFSKNIDIEHIVPKARVFDDSFSNKTLAFKEFNIKKGESTAFDYITSLNCEGELNQYLTRVENAYKTKSISLTKYKNLLKKASEIGDGFINRDLRDTQYIAKKAKEILFQVTKNVLSTSGSITDRLREDWGLVDVMKELNMPKYQSLGLTEVEERKDGNKVTVIKDWTKRNDHRHHAMDALTVAFTKPSYIQYLNHLNARKDENNKNYSVILAIEKKETIKVPINNGKNKRVFIEPILNFRQVAKKHLEEIFISHKAKNKVVTKNINKPAGTDKQQITLTPRGQLHKETIYGKYQYYVNKEEKVGVKFDERTITKVSNPLYREALLKRLQANDNDPKKAFAGKNALSKNPIYLDEAKTKTLPEKVNLTYLEEDFSIRKDISPDNFKDLKSIEKVIDQGVKRILIKRLQAYDNDPKKAFVDLEKNPIWLNKEKGIAIKRVTISGVSNAQPLHIGKDHLGKTTLNKEGKEVPVDYVSTGNNHHVAIYRDKEGNLQEQIVSFFEAVVRAQQGLPIIDKNYKQAEGWQFMFTMKQNEMFVFPNEATGFNPAEIDLLDPKNKKLISPNLFRVQTISIVKYGNSVVRDFKFRHHLETTLQDDKILQGITFQQIKSLEPLRNIVKVRINHLGDIVNIGEY

SEQ ID NO: 384 - protein, 1432 aa, Capnocytophaga sp.
MKNILGLDLGTTSIGFAHIVEDENKEKSEIKELGVRIVSLTTDEQSDFEKGKSITTNANRTLKHGARLNLDRYQQRRKYLIDLLHKANLITPSSILAENGKNTTHSTWQLRAKAVTERIEKEEFARILLAINKKRGYKSSRKAKTEDEGQAIDGMAIAKRLYDENLTPGQLSLQLLQQNKKLLPDFYRSDLQKEFDLVWNFQKQFYPDILTDIFYKELQGKGKDATSKAFSKRYHFDTAENKGSKESVRLQAYQWRAEAVSKQLSKEEVAYVLTEINNNLNNASGYLGAISDRSKELYFNRQTVGQYLYAQLQENRHNSLKNKVFYRQDYLDEFERIWETQALFHKELTDELKKQIRDVVIFYQRKPKSQKGLISFCEFESKEIEIEKDGKTITKNIGARVVPKSSPLFQEFKIWQILNNVICKRKGIRKKKISAKTTQLDLLNESSQTIFSLDMECKQLLFDELNLKGDLKSDKVLKLLGYSPQEWEINYNQLEGNRTQKALYEAYLKIVEMEAHDVKDILQIKSTKDDWSLDESPLSASEIRESVKAIFQALGICTKILYFDPLLPVKDFEEQDSYQLWHLLYSYESDDSTSGNETLYRILEKKYAFKREHARILANVALQDDYGSLSTKAIRKIYPNIKENQYSTACEMAGYKHSKLSLTTEELEARELKNIIPLLKKNALRNPVVEKILNQMINVVNALIEKNSERDAEGKITKYFHFDEIRIELARELKKNAQKRYEMTQNINKAKSEHQKISEILQKEFGIKNPTKSDIIRYRLYKELEHNGYKELYTNTYIAPDVLFSKNIDIEHIVPKARVFDDSFSNKTLAFKDFNIKKGESTAFDYITSLKNEEKLNQYLARVENAYKTKNISPAKYKNLLKKASEIGDGFINRDLRDTQYIAKKAKEILFQVTKNVLSTSGSITDRLREDWSLVDVMKELNMPKYQSLGLTEVEERKDGNKVTVIKDWTKRNDHRHHAMDALTVAFTKPSYIQYLNHLNARKDENNKNYSVILAIEKKETIKVPTNNGKNKRVFIEPIPNFRQVAKKHLEEIFISHKAKNKVVTKNTNKPAGTNKQQITLTPRGQLHKETIYGKYQYYVNKEEKVGVKFDKETIAKVSNPLYREALLKRLQANDNDPKKAFTGKNALSKNPIYLDEAKTKTLPEKVNLTYLEEDFSVRKKIVPKNPTSKEFVPNLKSIEKVVDEGVRNILIERLRVYNNDPEKAFVDLEKNPIWLNKEKGIAIKRVTISGVNNAQPLHIGKDHLGKTTLNKEGKEIPVDYVSTGNNHHVAIYRDKEGNLQEQIVSFFEAVVRTQQGLPIIDKTYKQEEGWQFLFTMKQNEMFVFPNEATGFNPAEIDLLDPKNKKQISPNLFRVQKIATKDYFFRHHLETNVETDNVLKNTTWKREGLSGLKDIVKVRINHLGDIVSIGEY

SEQ ID NO: 385 - protein, 1426 aa, Capnocytophaga sp.
MKNILGLDLGTTSIGFTHIVEDENKEKSEIKELGVRIVSLTTDEQSDFEKGKSISTNANRTLKHGARLNLDRYQQRRKFLIDLLQKANLITSSSILAENGKNTTHSTWQLRAKAVTERIEKEEFARVLLAINKKRGYKSSRKAKTEDEGQAIDGMAIAKRLYDENLTPGQLSLQLLQQNKKLLPDFYRSDLQKEFDLVWNFQKQFYPDILTDSFYKELQGKGKDATSKAFSKRYHFDTAENKGSRESVRLQAYQWRAEAISKQLSKEEVAYVLTEINNNLNNASGYLGAISDRSKELYFNRQTVGQYLYAQLQENKHNSLKNKVFYRQDYLDEFERIWETQASFHKELTEELKKQIRDVVIFYQRKLKSQKGLISFCEFESKEIEIEKDGKTITKSIGARVVPKSSPLFQEFKIWQILNNVTCKRKGIRKKKSSAKSTELDLFNEPSQTIFSLDMECKQLLFEELNLKGDLKSDKVLKLLGYSPQEWEINYNQLEGNRTQKALYEAYLKIVEMEAHDVKDILQIKSTKDDWALEESPLSASEIRERVKAIFQTLGICTKILYFDPLLPVKEFEEQDSYQLWHLLYSYESDDSTSGNETLYRILEKKYAFKREHATILANVTLQDDYGSLSTKAIRKIYPYIKENQYSTACEKAGYKHSKLSLTTEELEARELKNIIPLLKKNALRNPVVEKILNQMINVVNALIEKNSERDAEGKITKYFHFDEIRIELARELKKNAQERYEMTQNINKAKLEHQKISGILQKEFGIKNPTKSDITRYRLYQELAHNGYNDLYTNTYIPKELLFSKNIDIEHIVSKARVFDDSFSNKTLAFREFNIKKGESTAFDYITSLNNEEELNQYLNRVENAYKTKNISPAKYKNLLKKASEIGDGFINRDLRDTQYIAKKAKEILFQVTKNVLSTSGSITDRLREDWGLVDVMKELNMPKYQSLGLTEVEERKEGNKVTVIKNWTKRNDHRHHAMDALTVAFTKPSYIQYLNHLNARKDKNNKNYSVILAIEEKETIKVPTNNGKNKRVFIEPIPNFRQVAKKHLEEIFISHKAKNKVVTKNTNKPAGTDKQQITLTPRGQLHKETVYGKYQYYVNKEEKIGVKFDKETIAKVSNPVYREALLKRLQANDNDPKKAFAGKNALSKNPIYLDEAKTKTLTEKVNLTYLEEDFSIRKDISPDNFKDLKSIEKVIDQGVKRILIKRLQDYDNDPKKAFVDLEKNPIWLNKEKGIAIKRVTISGVNNAQPLHIGKDHLGKTTLNKEGKEIPVDYVSTGNNHHVAIYRDKEGNLQEQIVSFFEAVVGAQQGLPIVDKTYKQAEGWQFLFTMKQNEMFVFPNEATGFNPAEIDLLDPKNKKQISPNLFRVQKIATKDYFFRHHLETNVDTDNVLKNTTWKREGLSGLKDIVKVRINHLGDIVSIGEY

SEQ ID NO: 386 - protein, 1450 aa, Capnocytophaga sp.
MKRILGLDLGSNSIGWAFVEQDFENKQGKIIATGSRIIPMDQGILGDFEKGNTVSQTAERTTYRSMRRLRERHLLRRERLHRVLHILGFLPPHYDAQIDFTKRYGKFIDNAEPKIAYNNGNFIFMNSFNEMIEDFKKYQPQLFYKKSNGEESKIPYDWTIYYLRKKVLSQKITQQELAWLILHFNQKRGYYQLRGEEETENPNKEVAFHSLKVVDVEAEAPNKKGEIWYTIRLENGWIYRRTSKIPLDDWKGKTRDFIVTTDLNDDGTIKVDKEGKEKRSFRAPDENDWNLLKKKTEHDIDFSGKTVGAYIYDHLLQNPNQKIKGKLVRTIERKYYKDELKAILAKQIALQPELFTETLLADCIRELYRKNETQQQNLLSKDFLHLFVEDIIFYQRPLRSKKSTIANCTLEKRSYIDKETNERKDTFIKVCAKSNPYYQEFRVLQWLQNLRIYEIETDREVTAEFIETAEDYEALFNFLMSQKEIDNEGLLKYFLFAKNPQIKDKVAKSELKKWLTTYRWNYVYDAADNSSKKYPMNETGYDLQRYLQKVEGLPANFLTFDITYRLWHLLYSVKDKVEFEKALKKFAQEYQLDEASFVDSFKNFKPYPNEYGSFSEKAIKKLLPLMRFGNHWDFNRIDVSTQKRIDDLINGVANDEIRTIIREKAEKYQLNSESCFQGLPLWLAQYVVYNRHAEATDIEKWTSVSDLETYLEDFKQHSLRNPIVEQVVTETLRVVRDIWQQYGGGQANFFDEIHIELGRELKKTAEERKQLSNRNQENENTNLRIKKLLAELKEDASIQNVRPYSPVQQELLKIYEEGVFSSTDQVEEDIQKIRKKAEPTTPEIQRYKLWLEQKYKSPYTGEVISLTKLFTEEYEIEHIIPQSRYYDDSLSNKVICESAVNKLKTNQLGLEFIQNHHGEKVRITGNKEVTIFTEEQYKEFVKKHYANNSAKQQKLLLNEIPEKMVARQLNDTRYISKYISEILSKIVRSDEKDEGVNSKNVIPCTGKITTALKQDWGLNDVWNELILPRFERMNQLTQTQLFTSYNDRFQKNLPTVPIEYSQGFQKKRIDHRHHAMDALVIACATREHINYMNNQHALDKNKDKKEKQQSRIDLRTILCEKKNNNWQFKKPWSTFTQETKEALEHIVVSFKQNLRVINKATNYYEKWEEKNGVLVKKKVKQEGTNWAIRKPLHKETVSGKIVLDRKIGKDKILTATRKEVDITFTEKIISSITDTGIQKILLNYLNYKGSPEVAFSAEGLEELNKNIAQYNDGKKHQPIYKVRIFEEGSKFPLGETGAKATKFVEAAKGTNLFFGVYQGKEKRSYATIPLNEVIERQKQGLPSVPERNEKGEPLLFSLSPNDLVYVPMEGEIAETIDFNNLSKEQKERIYKTVSFTGNQCFFVQEAVATPIVNKMEYSPLNKMERDILGTMIKEVCIKLKVDRLGNITKA

SEQ ID NO: 387 - protein, 1437 aa, Capnocytophaga sp.
MKYIKYILGLDIGSNSIGWALIQLDLLQKTKRIIATGSRIIPMDQKVLSDFGKGITISPTAQRTSYRNARHCRERHLLRRERLHRVLHILGFLPTHYDKQIDFSKRYGKFVDNTEPKIAYNERKFLFMDSFQEMLADFKIHQPDLFYTKKNGEESKIPYDWTIYYLRKKALSRKISKEELAWIILNFNQKRGYYQLREEEEENKENDFEIISSKIISVIKKDKDKKYNKYWYDIILENGLVYQAAFYNDFVYNWINQDREFIIERISLKNGTEKVKLSYLPTFDEIDKMDKKEQDKYYKKIKIKTENSIGNKTVGCYIYDHILQNPNEKIKGKLVRTIERKYYKEELKAILEKQVALQPELFTDQLFADCIRELYSKNEAQQRNLAARDFVHLFVEDIIFYQRSLRRQKSTLANCSLESRSYIDKDSHTRKEAPLKVCPKSNPYYQEFRVLQWLQNLKIYEIDTDQEVTHEFIKTLEDKQQFFDFLMNQKEIDCEELLKYFLNQTYPNAREKALKSELKKWKDTYRWNYVYDIGEKSSKKYPMNETRYELKRHLEKVANLPDDFLSSEVEYLLWHLIYSVKDKVAYEKGLKTFAQKHHLDKDSFVESFKKFKPYPSEYGSFSEKAIRKLLPLMRFGSYWDFNHIDKNTQKRIEDLITGVENEEIRTILREKAEKYQLEKETDFQDLPLWLAQYIVYNRHAEASSLEKWTSVNDLETYLNEFKQYSLRNPIVEQVVMETLRVVRDIWQQYGQGQASFFDEIHIELGRELKKTAKEREKLSKQNQKNEDINLSIKEKLKELEKYNTRAYSITHQEKYKLWLEQKHISPYTGQIISPENLFTDNYEIEHIIPQSRFFDDSLSNKVVCESIVNKAPYKDRQLGLEFIKNQGGRIVKELSTENKTIKIFTEEQYRTFIKEHYSNNPEKTKKLLLEEIPEKMVARQMNDTCYISKFISEILSKIVRSDEQDEGVHSKNVILCTGKITSALKQDWGVNDVWNDLILPRFERMNDLTQSTLFTTYNEKYQKYLPTVPMEYSNGFQKKRIDHRHHAMDAIIIACATREHINYINNQHALEKGKDKKEKQKEHDKLREKLCIKKDNKGSEENYSWIFKKPWDTFTQEVQAALEGIVVSFKQNLRVINKATNYYERWVEENGKYIKKMVKQEGTNWAIRKPLHEETISGKIYLDREEITKNDILTATRKTVDSSFDEKRIKKITDTGIQKILLNYLKYKGSPEIAFSPEGLEELNKNLSIYNDGKPHKPIYKVRIYEKGSGRFALGEKGRKYKKYVQGAPNLYFGIYQGANKRSFATIPLNEVIERQKQGRPSIPEYNEKGDPLLFSLSPNDLVYVPVEGEIIEDIDFQNLSKEQKERIYNVNDFSSTCYFTPNRIAKAIFPKEVDLQRKGDKLPGSYDTKTASLEGIQIKEVCIKLKIDRLGNISKA

SEQ ID NO: 388 - protein, 1140 aa, Catellicoccus marimammalium
MKNMTKVNVGLDVGISSAGWSVINAETNQILESGVRLFSGSDADENVNRRNQRQGRRLFRRRKLRIQEAKKYLENVFQLKDIEPKDEWNPYEIRVRALNEKVSKEELSIALLNIVKHRGISYELEDVTDEEGTNTQSFQSGLDYNRRLLKTKTVGEIQYDRLQKYGQVRGQIQTEDGLLINIFPTKNYVEEVERILETQKKYHPEIDDVFIEKIISFVTRKREYFVGPGNEKSRTDYGIYRENGETLDNLFEILIGKDKFYPEEYRAAGSSYTAQIFNLLNDLNNLRIPTTEDHHLTKAQKEEIITELKNTSRLSGGMLKLISKVTKAPKEEISGYRKDEKDKPDLHSLAYYRKQKNMLEKEGIQIADFSEELLDELATMMTLNTEPGEIRKQLNKITNQYDILTPEVIEVLVKNHTAFVATSNHKWHRFSLKLMKEFIPELLETSKEQSTILCERGFIQNRASYLDENHHFNYAELRENLYNPVVRKSTCEMLKVFTAIQEKYPNIQNVIVELPRETNEDEQKRKIKKINDNNAKRKKEILKEAQAQSGLSEEALEEKLLKTKGLYLKLMLWYEQEGKCVYSGQEIPLSDLLQNKGGYEVDHIIPISISFDDRLCNKVLVRQQLNSQKSNQTPFEYMTTHTDGHLSFHELKELVGKNKRFSKEKRELLLAEIYSNDIETRKRFINRNLVDTSYTARIVLNALQQYKKENQLSMNVSVVRGAMTNILRKKVKLDKTRETFHHHAIDASLMAVIPNIEFFKERKEWLPKSANEEVVEVEVSEEETMPEKEFKVKMRLPESFIQDVQILQRNSFAKEEVSGPQTRERNLKIKFSHQVDQKMNRKVADDTIYGTRQAQLGKDKKEETYVIGKIKDIYNYDEYVRFKKRYDKNKESFLMYHHDPQTFEKLEEILAQYPEYIEDEKGKKKKVSPFALYREENGPVTKYAKKNNGPVIKQLKYYDSKLNRKIDISHKYSTKNRQVVLQSLKPYRTDVYRNQDTGEYTLVGIDQNDGKFVNGHYGIPKSRYEEIKANNKLSEHDEFVFSLYKNSMVKVIDENGESIVVRYLSRSMPNRKNNAEIKPVEKYQFEDGEVVPVYGKCRKQMQTVFVKKGWTLLKGNTDILGNTYFVEKESENPKKMIDDK

SEQ ID NO: 389 - protein, 1419 aa, Chryseobacterium sp.
MMIKNILGLDLGTNSIGWALIKQNFENKYGEILGMGSRIIPMSQDVLGEFGKGNSVSQTAARTGYRGVRRLRERFLLRRERLHRVLNVLNFLPEHYASQIDFEKRFGKFKYETEPKLAYNNDGFFFKNSFDEMLGDFKDHQFHLLENGRKVPYDWTIYYLRKKALSQKIEKEELAWILLNFNQKRGYYQLRGEDFEEEKDRVFVRLKVDRVVDSGENIKGKILYDVYFENGWKYEKQIVKTEDWIGRTKEFIVTESILKNGDTKRTFKAVDSEKDWIAIKTKTEQEIDKSHKTVGAYIYEALLQNPKQKIKGKLVRTIERKFYREELKKILERQKEFHPELQSDDLYNDCIRELYRNNEAHQITLSKKDFVHLLLNDLIFYQRPLRSQKSSVSNCTLEFRKYKDENGVEHAQYLKTIPKSNPYYQEFRVWQWMFNLNIYRKDDDTNVTKEFLSSTEDYETLFEFLNNRKEVDQKALLRHFKLNEKTHRWNYVEDKKYPCNETKTMISTRLEKVENYPSDFLTREMEQNIWHIIYSVNDKIEYEKALKSFAHKNNLDENSFFEAFKKFPPFKSEYGSFSEKAIKKLLPLLRLGKYWNWESIDRKSQGRIEKIITGEFDGNIKDKVREKAIHLTAENDFQGLQLWLAQYIVYGRHSEASMIGKWNSADDLEEFLKGFKQHSLRNPIVEQVITETLRVVKDIWLKYGNGAKDFFSEIHIELGREMKQTKDERVDATKRITENENTNLRIKALLAEMMNDNSVENIRPYSPMQQEILKIYEDGILKSDIEIDDDILKISKTAQPSSSDLKRYKLWLEQRYKSPYTGQIIPLNKLFTSEYEIEHIIPQSRYFDDSFSNKIICESAVNKLKDNYIGLGFIKQFGGMIVECGFGKSVEIFKAEEYEDFVKKHYANNRSKRNKLLLEEIPEKMIDRQLNDTRHISKYISGVLSNIVRQEDGTDEGVNSKNIVPGNGKITTQLKQDWGLNDVWNELILPRFERMNQLTNSTDFTSWNKNHQKFLPTVPIEFSKGFSKKRIDHRHHAMDALVIACATKDHINLLNNQSAKSDTKRYDLKRKLMKFERVVYSHSKTGEKIEKEVPKQFLKPWDNFTVDAKNKMETIIVSFKQNLRVINKATNHYEKWIEKDGIKRKELIKQEGTNWAIRKPMHKETVSGKVDLPGIKIPKGKILTATRKSLDTSFDLKTINSITDTGIQKILKNYLEFKGSSELAFSPEGIEDMNKNIEKFNDGKPHQSINKVRIFELGSKFSVGQTGNKKDKYVEAAKGTNLFFAVYEDKNGKRSYETIPLNEVIERQKQGLDSVSFKNKEDFLLCPNDLVYVPSEDELENIYNIDFKNLTTEKTGNIYKVVSFSGNQIFFIRQDIAISIVNKAEFSTLNKMERAIDGSMIKENCIKLKIDRLGNIAKI

SEQ ID NO: 390 - protein, 1065 aa, Clostridium perfringens
MNKDINYALGLDIGITSVGWAVINLDLNRIEDLGVRIFNAAENPKDGSSLALPRRLARGRRRLLRRKAYRVERVRKLIVKNNILTKEELEGLFKNKEVIDVWEARVKGLDYKLSREEWAKILINFCKRRGFKSNRKNETKDKEAGQILSSISYNIEKMKETNSRTIGEYIYNEVKNSDDSYAPLRNKFGEYKMCVSRDVLREEIHTLFEKQRELGNNFASDEIEDKYFEIFNSQRPFSNFEDLEKLVGFCTFERKKHKRAPKHCISSEEFTLYEGINKLSIIKDGEKRKLSEEERTLVVNEAFNKKEIKYTTLRKLLGLSEDELFSTLTYSIDKDISKTENTKFVSLKGYHEIKRAIEKGVSKKAWQDIENNRNLLNDIAYVLTLGKTDDEIEKQLRLRNVPEELFESLLDMSFSKFNNLSIYALEKILPFMKEGYQYNEACEKAGYNFKAIYEGVRTKKLPVIEIDEIVNPVVNRALAQTRKVINSVIDKYGSPVRINIELARDLAKNFKDRKLIEKEQKENRANLDKIRENLRELMDKEPTAVEVLKYRLWEQQRGECAYTQSQIALERLFSPGYCEIDHIIPFSRSFDDSLSNKILVLGSENQRKGNKIPYEYFGEDSERWNSFEIWVKGSYLNYKKKANLLKKKFTEEEQRDWKARNLQDTKYICRYISNFVNNRLEFKESENKQKVITVNGRATAYLRSRWGLNKVREDGDKHHALDAAVVGVTTQGMVQKISKYSKAHELYTVRKNDEFVDVETGECVDVDEYKEIRKDILPRPWRGFSEELKLRLSDNPLEELKKLPIETYNEEFIKENVKPIFVSRVPFRKISGKLFKETIYSERAFKDGYFVSKKSLVDLKRGDLDNFYNYECDKKLYDAISERMKEFNYNGKKAFESPFRKPTKSGKEGPVVRSVKIKSAAPFKDGIPMNEGLVAKEGMVRIDIYEKEGKYFVVPVYRYQLAKGIVPKRAAIAGKSELKWPIMDQTYNFKFSIFKNDLIEIKYAKKDGYFGYYDGFDRHTASLVIENHDNSDRYRGIGVKTGVVEFNKYEVDVLGNYHKVNLGGN

SEQ ID NO: 391 - protein, 1099 aa, Corynebacterium accolens
MSLSYRVGIDVGTYSLGCTAIEVDDNDQPVNILSSVSLIHDSGLDPDQQKRAVTRLASSGVARRTRRLYRRRRRRMINLEKFLTSQGWETRPFEHYSDPYLPWNARVALVNGYISDDAQRGMYLSIAFRHIANHRGWRNPYWKVSSLYSPDKPSDAFEQIRKELEESTGHKIPETVTVGQLISFAQFGKDRLRGGGKKKDEKKPQEQVNQAVISARLHQIDHAREINEICRVQKIDDALRKQILDLVFAAESPKGAQIGRVGKDPLQPKLPRALKASDAFQQYRIVALAGNLRIYRDGVSTPLDRDEKLIVFNYLINLSHKEEPSWLKVAEVLNIDRGQLHGTATMTDDGERAGAAPPVHDTNRTILGCKIKPLVHWWEGANDDERAAMLKALSNSEVEDFDSPAGAQTQAFFANLDESEQEKLDSLHLPIGRAAYSEDTLMRLTSRMLDENLDLYEARLAEFDIPKDWAPPAPRIGEPVGNPAVDRVLKGVARWLEAAADEWGAPKSVVIEHVRDGFISKSKANEIDRANNARHKRNRELFKQMQENLGIDGKLRSSDLWRYQSVQRQNCQCAYCGSPITYTTCEMDHIVPRAGEGSTNTRDNLVATCHRCNLAKKNIPFAVWAAQTNIPGVSVKEALDRTRHWSEDSGMTSKDFKKFRKNVCDRLKRTVVDEPLDARSMESVAWMANELRGRVAQRFQEENTVVNVYRGELTAEARRAAGISDKLRFIDGTGKSRLDRRHHAVDAAVVAFTQNYVAETLAIRSNKKREAQLLQAAEQWKEFTGSDAEHRAAWNAWLPKMQKLAVLLQKALDEDRIAVTSNLRLRLGNGRAHEDSIGELKTIRVGDAISVTDIDRASSEALWCALTREPDFDENNGLPENPDRRIRIHGTWYDAEDDIEVFPVGAGAIKVRGGYAELSRFHHARIYKIPGKKAPVYCMLRVYNADLIRHRHEDLFSVEIKPQTMSVRQAEPKLRKALAENTAEYLGWLVTDDELVIDTSNFNTGQIAEMQSELGQVRRWRLDGFYSPSTLRLRPLQMSAEGLREDTSIGAKKIIDRPGWLPAINKLFGEGHVTVVRRDALGRARLTSNAHLPISWKAE

SEQ ID NO: 392 - protein, 1084 aa, Corynebacterium diphtheriae
MKYHVGIDVGTFSVGLAAIEVDDAGMPIKTLSLVSHIHDSGLDPDEIKSAVTRLASSGIARRTRRLYRRKRRRLQQLDKFIQRQGWPVIELEDYSDPLYPWKVRAELAASYIADEKERGEKLSVALRHIARHRGWRNPYAKVSSLYLPDGPSDAFKAIREEIKRASGQPVPETATVGQMVTLCELGTLKLRGEGGVLSARLQQSDHAREIQEICRMQEIGQELYRKIIDVVFAAESPKGSASSRVGKDPLQPGKNRALKASDAFQRYRIAALIGNLRVWVDGEKRILSVEEKNLVFDHLVNLTPKKEPEWVTIAEILGIDRGQLIGTATMTDDGERAGARPPTHDTNRSIVNSRIAPLVDWWKTASALEQHAMVKALSNAEVDDFDSPERAKVQAFFADLDDDVHAKLDSLHLPVGRAAYSEDTLVRLTRRMLSDGVDLYTARLQEFGIEPSWTPPTPRIGEPVGNPAVDRVLKTVSRWLESATKTWGAPERVIIEHVREGFVTEKRAREMDGDMRRRAARNAKLFQEMQEKLNVQGKPSRADLWRYQSVQRQNCQCAYCGSPITFSNSEMDHIVPRAGQGSTNTRENLVAVCHRCNQSKGNTPFAIWAKNTSIEGVSVKEAVERTRHWVTDTGMRSTDFKKFTKAVVERFQRATMDEEIDARSMESVAWMANELRSRVAQHFASHGTTVRVYRGSLTAEARRASGISGKLEFLDGVGKSRLDRRHHAIDAAVIAFTSDYVAETLAVRSNLKQSQAHRQEAPQWREFTGKDAEHRATWRVWCQKMEKLSALLTEDLRDDRVVVMSNVRLRLGNGSAHEETIGKLSKVKLGSQLSVSDIDKASSEALWCALTREPDFDPKDGLPANPERHIRVNGTHVYAGDNIGLFPVSAGSIALRGGYAELGSSFHHARVYKITSGKKPAFAMLRVYTIDLLPYRNQDLFSVELKPQTMSMRQAEKKLRDALATGNAEYLGWLVVDDELVVDTSKIATDQVKAVEAELGTIRRWRVDGFFGDTRLRLRPLQMSKEGIKKESAPELSKIIDRPGWLPAVNKLFSEGNVTVVRRDSLGRVRLESTAHLPVTWKVQ

SEQ ID NO: 393 - protein, 1084 aa, Corynebacterium diphtheriae
MKYHVGIDVGTFSVGLAAIEVDDAGMPIKTLSLVSHIHDSGLDPDEIKSAVTRLASSGIARRTRRLYRRKRRRLQQLDKFIQRQGWPVIELEDYSDPLYPWKVRAELAASYIADEKERGEKLSVALRHIARHRGWRNPYAKVSSLYLPDGPSDAFKAIREEIKRASGQPVPETATVGQMVTLCELGTLKLRGEGGVLSARLQQSDHAREIQEICRMQEIGQELYRKIIDVVFAAESPKGSASSRVGKDPLQPGKNRALKASDAFQRYRIAALIGNLRVRVDGEKRILSVEEKNLVFDHLVNLAPKKEPEWVTIAEILGIDRGQLIGTATMTDDGERAGARPPTHDTNRSIVNSRIAPLVDWWKTASALEQHAMVKALSNAEVDDFDSPEGAKVQAFFADLDDDVHAKLDSLHLPVGRAAYSEDTLVRLTRRMLADGVDLYTARLQEFGIEPSWTPPAPRIGEPVGNPAVDRVLKTVSRWLESATKTWGAPERVIIEHVREGFVTEKRAREMDGDMQRRAARNAKLFQEMQEKLNVQGKPSRADLWRYQSVQRQNCQCAYCGSPITFSNSEMDHIVPRAGQGSTNTRENLVAVCHRCNQSKGNTPFAIWAKNTSIEGVSVKEAVERTRHWVTDTGMRSPDFKKFTKAVVERFQRATMDEEIDARSMESVAWMANELRSRVAQHFASHGTTVRVYRGSLTAEARRASGISGKLKFFDGVGKSRLDRRHHAIDAAVIAFTSDYVAETLAVRSNLKQSQAHRQEAPQWREFTGKDAEHRAAWRVWCQKMEKLSALLTEDLRDDRVVVMSNVRLRLGNGSAHKETIGKLSKVKLGSQLSVSDIDKASSEALWCALTREPDFDPKEGLPANPERHIRVNGTHVYAGDNIGLFPVSAGSIALRGGYAELGSSFHHARVYKITSGKKPAFAMLRVYTIDLLPYRNQDLFSVELKPQTMSMRQAEKKLRDALATGNAEYLGWLVVDDELVVDTSKIATDQVKAVEAELGTIRRWRVDGFFSPSKLRLRPLQMSKEGIKKESAPELSKIIDRPGWLPAVNKLFSDGNVTVVRRDSLGRVRLESTAHLPVTWKVQ

SEQ ID NO: 394 - protein, 1084 aa, Corynebacterium diphtheriae
MKYHVGIDVGTFSVGLAAIEVDDAGMPIKTLSLVSHIHDSGLDPDKIKSAVTRLASSGIARRTRRLYRRKRRRLQQLDKFIQRQGWPVIELEDYSDPLYPWKVRAELAASYIADEKERGEKLSVALRHIARHRGWRNPYAKVSSLYLPDEPSDAFKAIREEIKRASGQPVPETATVGQMVTLCELGTLKLRGEGGVLSARLQQSDHAREIQEICRMQEIGQELYRKIIDVVFAAESPKGSASSRVGKDPLQPGKNRALKASDAFQRYRIAALIGNLRVRVDGEKRILSVEEKNLVFDHLVNLAPKKEPEWVTIAEILGIDRGQLIGTATMTDDGERAGARPPTHDTNRSIVNSRIAPLVDWWKTASALEQHAMVKALSNAEVDDFDSPEGAKVQAFFADLDDDVHAKLDSLHLPVGRAAYSEDTLVRLTRRMLADGVDLYTARLQEFGIEPSWTPPAPRIGEPVGNPAVDRVLKTVSRWLKSATKTWGAPERVIIEHVREGFVTEKRAREMDGDMRRRAARNAKLFQEMQEKLNVQGKPSRADLWRYQSVQRQNCQCAYCGSPITFSNSEMDHIVPRAGQGSTNTRENLVAVCHRCNQSKGNTPFAIWAKNTSIEGVSVKEAVERTRHWVTDTGMRSTDFKKFTKAVVERFQRATMDEEIDARSMESVAWMANELRSRVAQHFASHGTTVRVYRGSLTAEARRASGISGKLEFLDGVGKSRLDRRHHAIDAAVIAFTSDYVAETLAVRSNLKQSQAHRQEAPQWREFTGKDAEHRAAWRVWCQKMEKLSALLTEDLRDDRVVVMSNVRLRLGNGSAHEETIGKLSKVKLGSQLSVSDIDKASSEALWCALTREPDFDPKDGLPANPERHIRVNGTHVYAGDNIGLFPVSAGSIALRGGYAELGSSFHHARVYKITSGKKPAFAMLRVYTIDLLPYRNQDLFSVELKPQTMSMRQAEKKLRDALATGNAEYLGWLVVDDELVVDTSKIATDQVKAVEAELGTIRRWRVDGFFGDTRLRLRPLQMSKEGIKKESAPELSKIIDRPGWLPAVNKLFSEGNVTVVRRDSLGRVRLESTAHLPVTWKVQ

SEQ ID NO: 395 - protein, 1084 aa, Corynebacterium diphtheriae
MKYHVGIDVGTFSVGLAAIEVDDAGMPIKTLSLVSHIHDSGLDPDKIKSAVTRLASSGIARRTRRLYRRKRRRLQQLDKFIQRQGWPVIELEDYSDPLYPWKVRAELAASYIADEKERGEKLSVALRHIARHRGWRNPYAKVSSLYLPDEPSDAFKAIREEIKRASGQPVPETATVGQMVTLCELGTLKLRGEGGVLSARLQQSDHAREIQEICRMQEIGQELYRKIIDVVFAAESPKGSASSRVGKDPLQPGKNRALKASDAFQRYRIAALIGNLRVRVDGEKRILSVEEKNLVFDHLVNLAPKKEPEWVTIAEILGIDRGQLIGTATMTDDGERAGARPPTHDTNRSIVNSRIAPLVDWWKTASALEQHAMVKALSNAEVDDFDSPEGAKVQAFFADLDDDVHAKLDSLHLPVGRAAYSEDTLVRLTRRMLADGVDLYTARLQEFGIEPSWTPPAPRIGEPVGNPAVDRVLKTVSRWLESATKTWGAPERVIIEHVREGFVTEKRAREMDGDMRRRAARNAKLFQEMQEKLNVQGKPSRADLWRYQSVQRQNCQCAYCGSPITFSNSEMDHIVPRAGQGSTNTRENLVAVCHRCNQSKGNTPFAIWAKNTSIEGVSVKEAVERTRHWVTDTGMRSTDFKKFTKAVVERFQRATMDEEIDARSMESVAWMANELRSRVAQHFASHGTTVRVYRGSLTAEARRASGISGKLEFLDGVGKSRLDRRHHAIDAAVIAFTSDYVAETLAVRSNLKQSQAHRQEAPQWREFTGKDAEHRAAWRVWCQKMEKLSALLTEDLRDDRVVVMSNVRLRLGNGSAHEETIGKLSKVKLGSQLSVSDIDKASSEALWCALTREPDFDPKDGLPANPERHIRVNGTHVYAGDNIGLFPVSAGSIALRGGYAELGSSFHHARVYKITSGKKPAFAMLRVYTIDLLPYRNQDLFSVELKPQTMSMRQAEKKLRDALATGNAEYLGWLVVDDELVVDTSKIATDQVKAVEAELGTIRRWRVDGFFGDTRLRLRPLQMSKEGIKKESAPELSKIIDRPGWLPAVNKLFSEGNVTVVRRDSLGRVRLESTAHLPVTWKVQ

SEQ ID NO: 396 - protein, 1084 aa, Corynebacterium diphtheriae
MKYHVGIDVGTFSVGLAAIEVDDAGMPIKTLSLVSHIHDSGLDPDKMKSAVTRLASSGIARRTRRLYRRKRRRLQQLDKFIQRQGWPVIELEDYSDPLYPWKVRAELAASYIADEKERGEKLSVALRHIARHRGWRNPYAKVSSLYLPDEPSDAFKSIREEIKRASGQPVPETATVGQMVTLCELGTLKLRGEGGVLSARLQQSDHAREIQEICRMQEIGQELYRKIIDVVFAAESPKGSASSRVGKDPLQPGKNRALKASDSFQRYRIAALISNLRVRVDGEKRILSVEEKNLVFDHLVNLAPKKEPEWVTIAEILGIDRGQLIGTATMTDDGERAGARPPTHDTNRSIVNSRIAPLVDWWKTASALEQHAMVKALSNAEVDDFDSPEGAKVQAFFADLDDDVHAKLDSLHLPVGRAAYSEDTLVRLTRRMLADGVDLYTARLQEFGIEPSWTPPAPRIGEPVGNPAVDRVLKTVSRWLESATKTWGAPERVIIEHVRDGFVTEKRAREMDGDMRRRAARNAKLFQEMQEKLNVQGKPSRADLWRYQSVQRQNCQCAYCGSPITFSNSEMDHIVPRAGQGSTNTRENLVAVCHRCNQSKGNTPFAIWAKNTSIEGVSVKEAVERTRHWVTDTGMRSTDFKKFTKAVVERFQRATMDEEIDARSMESVAWMANELRSRVAQHFASHGTTVRVYRGSLTAEARRASGISGKLEFLDGVGKSRLDRRHHAIDAAVIAFTSDYVAETLAVRSNLKQSQAHRQEAPQWREFTGKDAEHRAAWRVWCQKMEKLSALLTEDLRDDRVVVMSNVRLRLGNGSAHEETIGKLSKVKLGSQLSVSDIDKASSEALWCALTREPDFDPKDGLPANPERHIRVNGTHVYAGDNIGLFPVSAGSIALRGGYAELGSSFHHARVYKITSGKKPAFAMLRVYTIDLLPYRNQDLFSVELKPQTMSMRQAEKKLRDALATGNAEYLGWLVVDDELVVDTSKIATDQVKAVEAELGTIRRWRVDGFFGDTRLRLRPLQMSKEGIKKELAPELSKIIDRPGWLPAVNKLFSEGNVTVVRRDSLGRVRLESTAHLPVTWKVQ

SEQ ID NO: 397 - protein, 1084 aa, Corynebacterium diphtheriae
MKYHVGIDVGTFSVGLAAIEVDDAGMPIKTLSLVSHIHDSGLDPDKMKSAVTRLASSGIARRTRRLYRRKRRRLQQLDKFIQRQGWPVIELEDYSDPLYPWKVRAELAASYIADEKERGEKLSVALRHIARHRGWRNPYAKVSSLYLPDEPSDAFKSIREEIKRASGQPVPETATVGQMVTLCELGTLKLRGEGGVLSARLQQSDHAREIQEICRMQEIGQELYRKIIDVVFAAESPKGSASSRVGKDPLQPGKNRALKASDAFQRYRIAALIGNLRVRVDGEKRILSVEEKNLVFDHLVNLAPKKEPEWVTIAEILGIDRGQLIGTATMTDDGERAGARPPTHDTNRSIVNSRIAPLVDWWKTASALEQHAMVKALSNAEVDDFDSPEGAKVQAFFADLDDDVHAKLDSLHLPVGRAAYSEDTLVRLTRRMLADGVDLYTARLQEFGIEPSWTPPAPRIGEPVGNPAVDRVLKTVSRWLESATKTWGAPERVIIEHVREGFVTEKRAREMDGDMRRRAARNAKLFQEMQEKLNVQGKPSRADLWRYQSVQRQNCQCAYCGSPITFSNSEMDHIVPRAGQGSTNTRENLVAVCHRCNQSKGNTPFAIWAKNTSIEGVSVKEAVERTRHWVTDTGMRSTDFKKFTKAVVERFQRATMDEEIDARSMESVAWMANELRSRVAQHFASHGTTVRVYRGSLTAEARRASGISGKLEFLDGVGKSRLDRRHHAIDAAVIAFTSDYVAETLAVRSNLKQSQAHRQEAPQWREFTGKDAEHRAAWRVWCQKMEKLSALLTEDLRDDRVVVMSNVRLRLGNGSAHEETIGKLSKVKLGSQLSVSDIDKASSEALWCALTREPDFDPKDGLPANPERHIRVNGTHVYAGDNIGLFPVSAGSIALRGGYAELGSSFHHARVYKITSGKKPAFAMLRVYTIDLLPYRNQDLFSVELKPQTMSMRQAEKKLRDALATGNAEYLGWLVVDDELVVDTSKIATDQVKAVEAELGTIRRWRVDGFFGDTRLRLRPLQMSKEGIKKESAPELSKIIDRPGWLPAVNKLFSEGNVTVVRRDSLGRVRLESTAHLPVTWKVQ

SEQ ID NO: 398 - protein, 1084 aa, Corynebacterium diphtheriae
MKYHVGIDVGTFSVGLAAIEVDDAGMPIKTLSLVSHIHDSRLDPDKIKSAVTRLASSGIARRTRRLYRRKRRRLQQLDKFIQRQGWPVIELEDYSDPLYPWKVRAELAASYIADEKERGEKLSVALRHIARHRGWRNPYAKVSSLYLPDEPSDAFKAIREEIKRASGQPVPETATVGQMVTLCELGTLKLRGEGGVLSARLQQSDHAREIQEICRMQEIGQELYRKIIDVVFAAESPKGSASSRVGKDPLQPGKNRALKASDAFQRYRIAALIGNLRVRVDGEKRILSVEEKNLVFDHLVNLAPKKEPEWVTIAEILGIDRGQLIGTATMTDDGERAGARPPTHDTNRSIVNSRIAPLVDWWKTASALEQHAMVKALSNAEVDDFDSPEGAKVQAFFADLDDDVHAKLDSLHLPVGRAAYSEDTLVRLTRRMLADGVDLYTARLQEFGIEPSWTPPAPRIGEPVGNPAVDRVLKTVSRWLESATKTWGAPERVIIEHVREGFVTEKRAREMDGDMRRRAARNAKLFQEMQEKLNIQGKPSRADLWRYQSVQRQNCQCAYCGSPITFSNSEMDHIVPRAGQGSTNTRENLVAVCHRCNQSKGNTPFAIWAKNTSIEGVSVKEAVERTRHWVTDTGMRSTDFKKFTKAVVERFQRVTMDEEIDARSMESVAWMANELRSRVAQHFASRGTTVRVYRGSLTAEARRASGISGKLEFLDGVGKSRLDRRHHAIDAAVIAFTSDYVAETLAVRSNLKQSQAHRQEAPQWREFTGKDAEHRAAWRVWCQKMEKLSALLTEDLRDDRVVVMSNVRLRLGNGSAHEETIGKLSKVKLGSQLSVSDIDKASSEALWCALTREPDFDPKDGLPANPERHIRVNGTHVYAGDNIGLFPVSAGSIALRGGYAELGSSFHHARVYKITSGKKPAFAMLRVYTIDLLPYRNQDLFSVELKPQTMSMRQAEKKLRDALATGNAEYLGWLVVDDELVVDTSKIATDQVKAVEAELGTIRRWRVDGFFGDTRLRLRPLQMSKEGIKKESAPELSKIIDRPGWLPAVNKLFSEGNVTVVRRDSLGRVRLESTAHLPVTWKVQ

SEQ ID NO: 399 - protein, 1069 aa, Corynebacterium matruchotii
MAAIAIDDDGKPTEILSAISLIHDSGVDPDSAKSAATRLATSGIARRTRRLYRRKRKRLAKLDKFISSQGWPLKEFEKYEDPFYPWRVRAELATTAITDQQELGEKLSIALRHIARHRGWRNPYSKVTALYTVTEPSDAFLAMQEECAKQLGRTIPETITVGQLVTGMNLGKTRLRGENSLLAARPRQSDNANEIHTIAKVQGLSNELVRQIIDHVFAAESPKGSAAEQVGKDPLQPTKKRALKASDAFQQYRIAALIGNLRIRGGKGNRRLTTEETRLVFDYLRSLPAKQEPTWQLVAEQLKIDRGNLVGTAIMTDDGERAGAKPPVHDTNRIMENTKIKPLATWWKSADADARAAMVKALSNAEVDDFDSQAGAQVQEFFFGISDEDQEKLDGLHLPIGRAAYSEDTLDRLTKRMIGEGMDLYEARQAEFKISNDWAPPAPEIGERVGNPAVDRVLKATARWLNAAERQWGAPKSVNIEHVRAAFMSESSARELDRDNQQRAKRNVKVVAEMQEKLGIEGRPSRADVWRFQSIQRQNGKCAYCGAEISFKNSEMDHIIPQVGEGSTNTRDNLVAVCRECNSSKSNIAFAVWAENTSRPGVSVQKAIERTHHWVTDSGLRKPEFDKFRKQVCDRLRRKATDEPIDARSLESVAWMANELRSRIAQKFKDGDTKVRVYKGALTAEARRASGISGKLEFVDGKGKSRLDRRHHAVDAAVVAFTSNYVAETLALRSNMKFDQELRRKAPQWREFTGSDHVHQVEWTKWKYRMQALAELLNNALVQDRIVVMHNLRLRLGNGAAHEDTIGKLTRLKVGDAISTTDIDRASSEALWCALTRDPDYDPKTGLPENPNRTIRIHGTHLTASDEITVFPVAAASIPIRDGFAKLGSNYHHVRLFRVPSGKKYKYCLMQVYTVDLLKFRKEDLFTVELKPQTISVRTCEALLRKALANGTAEYLGWLVSDDELLIDTSSFDTPGIVKLREEYGPVNRWRLAGLTSVTRLNLRPLYLSKEGLKPNVNPEIKKIIDNRSWIITVNKLFSSGHVKIIRRDALGRPRLHSAAHLPICWEVK

SEQ ID NO: 400 - protein, 210 aa, Diplosphaera colitermitum
MSDILDKPIVLSLNRAWQVIGHRTVKQALVALNGGNADLPPALGLDIAYPKFDDGAWNFDRPLFLNPLPWSEWIELPVRDFDFAITTPRLRIRVPTVIVATQFAKMPVRIPRLTREAIFERDGGVCQYTGEHVGKHGGNLDHVVPRDRGGRDSFENLVWAKREINSLKANRLPHEAGLRLLRRPKAPAPLPASMTIREARHPDWRHFLTP

SEQ ID NO: 401 - protein, 1332 aa, Dolosigranulum pigrum
MQKNYTIGLDIGTNSVGWAVMKDDYTLIRKRMKVLGNTDIKKIKKNFWGVRLFDEGETAKETRLKRGTRRRYQRRRNRLIYLQDIFQQPMLAIDENFFHRLDDSFFVPDDKSYDRHPIFGSLEEEVAYHNTYPTIYHLRKHLADNPEKADLRLVYTALAHIVKYRGHFLIEGELNTENTSISETFEQFLDTYSDIFKEQLVGDISKVEEILSSKQSRSRKHEQIMALFPNENKLGNFGRFMMLIVGNTSNFKPVFDLDDEYKLKLSDETYEEDLDTLLGMTDDVFLDVFMAAKNVYDAVEMSAIISTDTGNSKAVLSNQMINFYDEHKVDLAQLKQFFKTHLPDKYYECFSDPSKNGYAGYIDGKTNQEDFYKYIEKVMKTIKSDKKDYFLDKIDREVFLRKQRSFYNSVIPHQIHLQEMQAILDRQSQYYPFLAENRDKIESLVTFRIPYYVGPLTVSDQSEFAWMERQSDEPIRPWNFDEIVNKERSAEKFIERMTNMDTYLLEEKVLPKRSLLYQTFEVYNELTKVRYTNEQGKTEKLNRQQKAEIIETLFKQKNRVREKDIANYLEQYGYVDGTDIKGVEDKFNASLSTYNDLAKIDGAKAYLDDPEYADVWEDIIKILTIFEDKAMRKKQLQTYSDTLSPEILKKLERKHYTGWGRFSKKLINGLRDEGSNKTILDYLKSDEGSSGPTNRNFMQLIRDNTLSFKKKIEDAQTIEDTTHIYDTVAELPGSPAIKKGIRQALKIVEEIIDIIGYEPENIVVEMARESQTTKKGKDLSKERLEKLTEAIKEFDGPSDVKVKDLKNENLRNDRLYLYYLQNGRDMYTNEPLDINNLSKYDIDHIIPQSFTTDNSIDNKVLVSRTKNQGNKSDDVPSINIVHKMKPFWRQLHKAGLISDRKFKNLTKAEHGGLTEADRAHFLNRQLVETRQITKHVANLLDSQYNTAEEQRINIVLLKSSMTSRFRKEFKLYKVREINDYHHGHDAYLNAVVATTIMKVYPNLKPQFVYGQYKKTSMFKEEKATARKHFYSNITKFFKKEKVVNEETGEILWDTERHLSTIKRVLSWKQMNIVKKVEKQKGQLWKETIYPKGDSSKLIPVKEGMDPQKYGGLSQVSEAFAVVITHEKGKKKQLKSDLISIPIVDQKAYEQHPTAYLEEAGYNNPTVLHELFKYQLFELEDGSRRMIASAKEFQKGNQMVLPLELVELLYHANRYDKVKFPDSIEYVHDNLAKFDDLLEYVIDFSNKYINADKNVQKIQKIYKEHGTEDVELTVESFVNLMTFTAMGAPATFKFYGESITRSRYTSITEFRGSTLIFQSITGLYETRYKLEDN

SEQ ID NO: 402 - protein, 921 aa, Enterococcus faecalis
MIPHQIHLAELQAIIHRQAAYYPFLKENQEKIEQLVTFRIPYYVGPLSKGDASTFAWLKRQSEEPIRPWNLQETVDLDQSATAFIERMTNFDTYLPSEKVLPKHSLLYEKFMVFNELTKISYTDDRGIKANFSGKEKEKIFDYLFKTRRKVKKKDIIQFYRNEYNTEIVTLSGLEEDQFNASFSTYQDLLKCGLTRAELDHPDNAEKLEDIIKILTIFEDRQRIRTQLSTFKGQFSAEVLKKLERKHYTGWGRLSKKLINGIYDKESGKTILGYLIKDDGVSKHYNRNFMQLINDSQLSFKNAIQKAQSSEHEETLSETVNELAGSPAIKKGIYQSLKIVDELVAIMGYAPKRIVVEMARENQTTSTGKRRSIQRLKIVEKAMAEIGSNLLKEQPTTNEQLRDTRLFLYYMQNGKDMYTGDELSLHRLSHYDIDHIIPQSFMKDDSLDNLVLVGSTENRGKSDDVPSKEVVKDMKAYWEKLYAAGLISQRKFQRLTKGEQGGLTLEDKAHFIQRQLVETRQITKNVAGILDQRYNANSKEKKVQIITLKASLTSQFRSIFGLYKVREVNDYHHGQDAYLNCVVATTLLKVYPNLAPEFVYGEYPKFQTFKENKATAKAIIYTNLLRFFTEDEPRFTKDGEILWSNSYLKTIKKELNYHQMNIVKKVEVQKGGFSKESIKPKGPSNKLIPVKNGLDPQKYGGFDSPIVAYTVLFTHEKGKKPLIKQEILGITIMEKTRFEQNRILFLEEKGFLRPRVLMKLPKYTLYEFPEGRRRLLASAKEAQKGNQMVLPEHLLTLLYHAKQCLLPNQSESLTYVEQHQPEFQEILERVVDFAEVHTLAKSKVQQIVKLFEANQTADVKEIAASFIQLMQFNAMGAPSTFKFFQKDIERARYTSIKEIFDATIIYQSTTGLYETRRKVVD

SEQ ID NO: 403 - protein, 1337 aa, Enterococcus faecalis; identical to SEQ ID NO: 115

SEQ ID NO: 404 - protein, 1337 aa, Enterococcus faecalis
MKKDYVIGLDIGTNSVGWAVMTEDYQLVKKKMPIYGNTEKKKIKKNFWGVRLFEEGHTAEDRRLKRTARRRISRRRNRLRYLQAFFEEAMTALDENFFARLQESFLVPEDKKWHRHPIFAKLEDEVAYHETYPTIYHLRKKLADSSEQADLRLIYLALAHIVKYRGHFLIEGKLSTENISVKEQFQQFMIIYNQTFVNGESRLVSAPLPESVLIEEELTEKASRTKKSEKVLQQFPQEKANGLFGQFLKLMVGNKADFKKVFGLEEEAKITYASESYEEDLEGILAKVGDEYSDVFLAAKNVYDAVELSTILADSDKKSHAKLSSSMIVRFTEHQEDLKNFKRFIRENCPDEYDNLFKNEQKDGYAGYITHAGKVSQLKFYQYVKKIIQDIAGAEYFLEKIAQENFLRKQRTFDNGVIPHQIHLAELQAIIHRQAAYYPFLKENQEKIEQLVTFRIPYYVGPLSKGDANTFAWLKRQSEEPIRPWNLQETVDLDQSATAFIERMTNFDTYLPSEKVLPKHSLLYEKFMVFNELTKISYTDDRGIKANFSGKEKEKIFDYLFKTRRKVKKKDIIQFYRNEYNTEIVTLSGLEEDQFNASFSTYQDLLKCGLTRAELDHPDNAEKLEDIIKILTIFEDRQRIRTQLSTFKGQFSAEVLKKLERKHYTGWGRLSKKLINGIYDKESGKTILDYLIKDDGVSKHYNRNFMQLINDSQLSFKNAIQKAQSSEHEETLSETVNELAGSPAIKKGIYQSLKIVDELVAIMGYAPKRIVVEMARENQTTSTGKRRSIQRLKIVEKAMAEIGSNLLKEQPTTNEQLRDTRLFLYYMQNGKDMYTGDELSLHRLSHYDIDHIIPQSFMKDDSLDNLVLVGSTENRGKSDDVPSKEVVKDMKAYWEKLYAAGLISQRKFQRLTKGEQGGLTLEDKAHFIQRQLVETRQITKNVAGILDQRYNAKSKEKKVQIITLKASLTSQFRSIFGLYKVREVNDYHHGQDAYLNCVVATTLLKVYPNLAPEFVYGEYPKFQTFKENKATAKAIIYTNLLRFFTEDEPRFTKDGEILWSNSYLKTIKKELNYHQMNIVKKVEVQKGGFSKESIKPKGPSNKLIPVKNGLDPQKYGGFDSPIVAYTVLFTHEKGKKPLIKQEILGITIMEKTRFEQNPILFLEEKGFLRPRVLMKLPKYTLYQFPEGRRRLLASAKEAQKGNQMVLPEHLLTLLYHAKQCLLPNQSESLAYVEQHQPEFQEILERVVDFAEVHTLAKSKVQQIVKLFEANQTADVKEIAASFIQLMQFNAMGAPSTFKFFQKDIERARYTSIKEIFDATIIYQSTTGLYETRRKVVD

SEQ ID NO: 405 - protein, 1337 aa, Enterococcus faecalis
MKKDYVIGLDIGTNSVGWAVMTEDYQLVKKKMPIYGNTEKKKIKKNFWGVRLFEEGHTAEDRRLKRTARRRISRRRNRLRYLQAFFEEAMTALDENFFARLQESFLVPEDKKWHRHPIFAKLEDEVAYHETYPTIYHLRKKLADSSEQADLRLIYLALAHIVKYRGHFLIEGKLSTENISVKEQFQQFMIIYNQTFVNGESRLVSTPLPESVLIEEELTEKASRTKKSEKVLQQFPQEKANGLFGQFLKLMVGNKADFKKVFGLEEEAKITYASESYEEDLEGILAKVGDEYSDVFLAAKNVYDAVELSTILADSDKKSHAKLSSSMIVRFTEHQEDLKNFKRFIRENCPDEYDNLFKNEQKDGYAGYITHAGKVSQLKFYQYVKKIIQDIAGAEYFLEKIAQENFLRKQRTFDNGVIPHQIHLAELQAIIHRQAAYYPFLKENQEKIEQLVTFRIPYYVGPLSKGDASTFAWLKRQSEEPIRPWNLQETVDLDQSATAFIERMTNFDTYLPSEKVLPKHSLLYEKFMVFNELTKISYTDDRGIKANFSGKEKEKIFDYLFKTRRKVKKKDIIQFYRNEYNTEIVTLSGLEEDQFNASFSTYQDLLKCGLTRAELDHPDNAEKLEDIIKILTIFEDRQRIRTQLSTFKGQFSAEVLKKLERKHYTGWGRLSKKLINGIYDKESGKTILDYLVKDDGVSKHYNRNFMQLINDSQLSFKNAIQKAQSSEHEETLSETVNELAGSPAIKKGIYQSLKIVDELVAIMGYAPKRIVVEMARENQTTSTGKRRSIQRLKIVEKAMAEIGSNLLKEQPTTNEQLRDTRLFLYYMQNGKDMYTGDELSLHRLSHYDIDHIIPQSFMKDDSLDNLVLVGSTENRGKSDDVPSKEVVKDMKAYWEKLYAAGLISQRKFQRLTKGEQGGLTLEDKAHFIQRQLVETRQITKNVAGILDQRYNAKSKEKKVQIITLKASLTSQFRSIFGLYKVREVNDYHHGQDAYLNCVVATTLLKVYPNLAPEFVYGEYPKFQTFKENKATAKAIIYTNLLRFFTEDEPRFTKDGEILWSNSYLKTIKKELNYHQMNIVKKVEVQKGGFSKESIKPKGPSNKLIPVKNGLDPQKYGGFDSPIVAYTVLFTHEKGKKPLIKQEILGITIMEKTRFEQNPILFLEEKGFLRPRVLMKLPKYTLYEFPEGRRRLLASAKEAQKGNQMVLPEHLLTLLYHAKQCLLPNQSESLAYVEQHQPEFQEILERVVDFAEVHTLAKSKVQQIVKLFEANQTADVKEIAASFIQLMQFNAMGAPSTFKFFQKDIERARYTSIKEIFDATIIYQSTTGLYETRRKVVD

SEQ ID NO: 406 - protein, 1337 aa, Enterococcus faecalis
MKKDYVIGLDIGTNSVGWAVMTEDYQLVKKKMPIYGNTEKKKIKKNFWGVRLFEEGHTAEDRRLKRTARRRISRRRNRLRYLQAFFEEAMTDLDENFFARLQESFLVPEDKKWHRHPIFAKLEDEVAYHETYPTIYHLRKKLADSSEQADLRLIYLALAHIVKYRGHFLIEGKLSTENISVKEQFQQFMIIYNQTFVNGESRLVSAPLPESVLIEEELTEKASRTKKSEKVLQQFPQEKANGLFGQFLKLMVGNKADFKKVFGLEEEAKITYASESYEEDLEGILAKVGDEYSDVFLAAKNVYDAVELSTILADSDKKSHAKLSSSMIVRFTEHQEDLKKFKRFIRENCPDEYDNLFKNEQKDGYAGYIAHAGKVSQLKFYQYVKKIIQDIAGAEYFLEKIAQENFLRKQRTFDNGVIPHQIHLAELQAIIHRQAAYYPFLKENQEKIEQLVTFRIPYYVGPLSKGDASTFAWLKRQSEEPIRPWNLQETVDLDQSATAFIERMTNFDTYLPSEKVLPKHSLLYEKFMVFNELTKISYTDDRGIKANFSGKEKEKIFDYLFKTRRKVKKKDIIQFYRNEYNTEIVTLSGLEEDQFNASFSTYQDLLKCGLTRAELDHPDNAEKLEDIIKILTIFEDRQRIRTQLSTFKGQFSAEVLKKLERKHYTGWGRLSKKLINGIYDKESGKTILGYLIKDDGVSKHYNRNFMQLINDSQLSFKNAIQKAQSSEHEETLSETVNELAGSPAIKKGIYQSLKIVDELVAIMGYAPKRIVVEMARENQTTSTGKRRSIQRLKIVEKAMAEIGSNLLKEQPTTNEQLRDTRLFLYYMQNGKDMYTGDELSLHRLSHYDIDHIIPQSFMKDDSLDNLVLVGSTENRGKSDDVPSKEVVKDMKAYWEKLYAAGLISQRKFQRLTKGEQGGLTLEDKAHFIQRQLVETRQITKNVAGILDQRYNANSKEKKVQIITLKASLTSQFRSIFGLYKVREVNDYHHGQDAYLNCVVATTLLKVYPNLAPEFVYGEYPKFQTFKENKATAKAIIYTNLLRFFTEDEPRFTKDGEILWSNSYLKTIKKELNYHQMNIVKKVEVQKGGFSKESIKPKGPSNKLIPVKNGLDPQKYGGFDSPIVAYTVLFTHEKGKKPLIKQEILGITIMEKTRFEQNPILFLEEKGFLRPRVLMKLPKYTLYEFPEGRRRLLASAKEAQKGNQMVLPEHLLTLLYHAKQCLLPNQSESLAYVEQHQPEFQEILERVVDFAEVHTLAKSKVQQIVKLFEANQTADVKEIAASFIQLMQFNAMGAPSTFKFFQKDIERARYTSIKEIFDATIIYQSTTGLYETRRKVVD

SEQ ID NO: 407 - protein, 936 aa, Enterococcus faecalis
MKKDYVIGLDIGTNSVGWAVMTEDYQLVKKKMPIYGNTEKKKIKKNFWGVRLFEEGHTAEDRRLKRTARRRISRRRNRLRYLQAFFEEAMTDLDENFFARLQESFLVPEDKKWHRHPIFAKLEDEVAYHETYPTIYHLRKKLADSSEQADLRLIYLALAHIVKYRGHFLIEGKLSTENISVKEQFQQFMIIYNQTFVNGESRLVSAPLPESVLIEEELTEKASRTKKSEKVLQQFPQEKANGLFGQFLKLMVGNKADFKKVFGLEEEAKITYASESYEEDLEGILAKVGDEYSDVFLAAKNVYDAVELSTILADSDKKSHAKLSSSMIVRFTEHQEDLKKFKRFIRENCPDEYDNLFKNEQKDGYAGYIAHAGKVSQLKFYQYVKKIIQDIAGAEYFLEKIAQENFLRKQRTFDNGVIPHQIHLAELQAIIHRQAAYYPFLKENQEKIEQLVTFRIPYYVGPLSKGDASTFAWLKRQSEEPIRPWNLQETVDLDQSATAFIERMTNFDTYLPSEKVLPKHSLLYEKFMVFNELTKISYTDDRGIKANFSGKEKEKIFDYLFKTRRKVKKKDIIQFYRNEYNTEIVTLSGLEEDQFNASFSTYQDLLKCGLTRAELDHPDNAEKLEDIIKILTIFEDRQRIRTQLSTFKGQFSAEVLKKLERKHYTGWGRLSKKLINGIYDKESGKTILGYLIKDDGVSKHYNRNFMQLINDSQLSFKNAIQKAQSSEHEETLSETVNELAGSPAIKKGIYQSLKIVDELVAIMGYAPKRIVVEMARENQTTSTGKRRSIQRLKIVEKAMAEIGSNLLKEQPTTNEQLRDTRLFLYYMQNGKDMYTGDELSLHRLSHYDIDHIIPQSFMKDDSLDNLVLVGSTENRGKSDDVPSKEVVKDMKAYWEKLYAAGLISQRKFQRLTKGEQGGLTLEDKAHFIQRQLVETR

SEQ ID NO: 408 - protein, 1337 aa, Enterococcus faecalis
MKKDYVIGLDIGTNSVGWAVMTEDYQLVKKKMPIYGNTEKKKIKKNFWGVRLFEEGHTAEDRRLKRTARRRISRRRNRLRYLQAFFEEAMTDLDENFFARLQESFLVPEDKKWHRHPIFAKLEDEVAYHETYPTIYHLRKKLADSSEQADLRLIYLALAHIVKYRGHFLIEGKLSTENISVKEQFQQFMIIYNQTFVNGESRLVSAPLPESVLIEEELTEKASRTKKSEKVLQQFPQEKANGLFGQFLKLMVGNKADFKKVFGLEEEAKITYASESYEEDLEGILAKVGDEYSDVFLAAKNVYDAVELSTILADSDKKSHAKLSSSMIVRFTEHQEDLKKFKRFIRENCPDEYDNLFKNEQKDGYAGYIAHAGKVSQLKFYQYVKKIIQDIAGAEYFLEKIAQENFLRKQRTFDNGVIPHQIHLAELQAIIHRQAAYYPFLKENQEKIEQLVTFRIPYYVGPLSKGDASTFAWLKRQSEEPIRPWNLQETVDLDQSATAFIERMTNFDTYLPSEKVLPKHSLLYEKFMVFNELTKISYTDDRGIKANFSGKEKEKIFDYLFKTRRKVKKKDIIQFYRNEYNTEIVTLSGLEEDQFNASFSTYQDLLKCGLTRAELDHPDNAEKLEDIIKILTIFEDRQRIRTQLSTFKGQFSAEVLKKLERKHYTGWGRLSKKLINGIYDKESGKTILDYLVKDDGVSKHYNRNFMQLINDSQLSFKNAIQKAQSSEHEETLSETVNELAGSPAIKKGIYQSLKIVDELVAIMGYAPKRIVVEMARENQTTSTGKRRSIQRLKIVEKAMAEIGSNLLKEQPTTNEQLRDTRLFLYYMQNGKDMYTGDELSLHRLSHYDIDHIIPQSFMKDDSLDNLVLVGSTENRGKSDDVPSKEVVKDMKAYWEKLYAAGLISQRKFQRLTKGEQGGLTLEDKAHFIQRQLVETRQITKNVAGILNQRYNANSKEKKVQIITLKASLTSQFRSIFGLYKVREVNDYHHGQDAYLNCVVATTLLKVYPNLAPEFVYGEYPKFQTFKENKATAKAIIYTNLLRFFTEDEPRFTKDGEILWSNSYLKTIKKELNYHQMNIVKKVEVQKGGFSKESIKPKGPSNKLIPVKNGLDPQKYGGFDSPVVAYTVLFTHEKGKKPLIKQEILGITIMEKTRFEQNPILFLEEKGFLRPRVLMKLPKYTLYEFPEGRRRLLASAKEAQKGNQMVLPEHLLTLLYHAKQCLLPNQSESLAYVEQHQPEFQEILERVVDFAEVHTLAKSKVQQIVKLFEANQTADVKEIAASFIQLMQFNAMGAPSTFKFFQKDIERARYTSIKEIFDATIIYQSTTGLYETRRKVVD

SEQ ID NO: 409 - protein, 1337 aa, Enterococcus faecalis
MKKDYVIGLDIGTNSVGWAVMTEDYQLVKKKMPIYGNTEKKKIKKNFWGVRLFEEGHTAEDRRLKRTARRRISRRRNRLRYLQAFFEEAMTDLDENFFARLQESFLVPEDKKWHRHPIFAKLEDEVAYHETYPTIYHLRKKLADSSEQADLRLIYLALAHIVKYRGHFLIEGKLSTENISVKEQFQQFMIIYNQTFVNGESRLVSAPLPESVLIEEELTEKASRTKKSEKVLQQFPQEKANGLFGQFLKLMVGNKADFKKVFGLEEEAKITYASESYEEDLEGILAKVGDEYSDVFLAAKNVYDAVELSTILADSDKKSHAKLSSSMIVRFTEHQEDLKKFKRFIRENCPDEYDNLFKNEQKDGYAGYIAHAGKVSQLKFYQYVKKIIQDIAGAEYFLEKIAQENFLRKQRTFDNGVIPHQIHLAELQAIIHRQAAYYPFLKENQEKIEQLVTFRIPYYVGPLSKGDASTFAWLKRQSEEPIRPWNLQETVDLDQSATAFIERMTNFDTYLPSEKVLPKHSLLYEKFMVFNELTKISYTDDRGIKANFSGKEKEKIFDYLFKTRRKVKKKDIIQFYRNEYNTEIVTLSGLEEDQFNASFSTYQDLLKCGLTRAELDHPDNAEKLEDIIKILTIFEDRQRIRTQLSTFKGQFSAEVLKKLERKHYTGWGRLSKKLINGIYDKESGKTILGYLIKDDGVSKHYNRNFMQLINDSQLSFKNAIQKAQSSEHEETLSETVNELAGSPAIKKGIYQSLKIVDELVAIMGYAPKRIVVEMARENQTTSTGKRRSIQRLKIVEKAMAEIGSNLLKEQPTTNEQLRDTRLFLYYMQNGKDMYTGDELSLHRLSHYDIDHIIPQSFMKDDSLDNLVLVGSTENLGKSDDVPSKEVVKDMKAYWEKLYAAGLISQRKFQRLTKGEQGGLTLEDKAHFIQRQLVETRQITKNVAGILDQRYNANSKEKKVQIITLKASLTSQFRSIFGLYKVREVNDYHHGQDAYLNCVVATTLLKVYPNLAPEFVYGEYPKFQTFKENKATAKAIIYTNLLRFFTEDEPRFTKDGEILWSNSYLKTIKKELNYHQMNIVKKVEVQKGGFSKESIKPKGPSNKLIPVKNGLDPQKYGGFDSPIVAYTVLFTHEKGKKPLIKQEILGITIMEKTRFEQNPILFLEEKGFLRPRVLMKLPKYTLYEFPEGRRRLLASAKEAQKGNQMVLPEHLLTLLYHAKQCLLPNQSESLAYVEQHQPEFQEILERVVDFAEVHTLAKSKVQQIVKLFEANQTADVKEIAASFIQLMQFNAMGAPSTFKFFQKDIERARYTSIKEIFDATIIYQSTTGLYETRRKVVD

SEQ ID NO: 410 - protein, 1337 aa, Enterococcus faecalis
MKKDYVIGLDIGTNSVGWAVMTEDYQLVKKKMPIYGNTEKKKIKKNFWGVRLFEEGHTAEDRRLKRTARRRISRRRNRLRYLQAFFEEAMTDLDENFFARLQESFLVPEDKKWHRHPIFAKLEDEVAYHETYPTIYHLRKKLADSSEQADLRLIYLALAHIVKYRGHFLIEGKLSTENTSVKEQFQQFMVIYNQTFVNGESRLVSAPLPESVLIEEELTEKASRTKKSEKVLQQFPQEKANGLFGQFLKLMVGNKADFKKVFGLEEEAKITYASESYEEDLEGILAKVGDEYSDVFLAAKNVYDAVELSTILADSDKKSHAKLSSSMIVRFTEHQEDLKKFKRFIRENCPDEYDNLFKNEQKDGYAGYIAHAGKVSQLKFYQYVKKIIQDIAGAEYFLEKIAQENFLRKQRTFDNGVIPHQIHLAELQAIIHRQAAYYPFLKENQEKIEQLVTFRIPYYVGPLSKGDASTFAWLKRQSEEPIRPWNLQETVDLDQSATAFIERMTNFDTYLPSEKVLPKHSLLYEKFMVFNELTKISYTDDRGIKANFSGKEKEKIFDYLFKTRRKVKKKDIIQFYRNEYNTEIVTLSGLEEDQFNASFSTYQDLLKCGLTRAELDHPDNAEKLEDIIKILTIFEDRQRIRTQLSTFKGQFSAEVLKKLERKHYTGWGRLSKKLINGIYDKESGKTILDYLVKDDGVSKHYNRNFMQLINDSQLSFKNAIQKAQSSEHEETLSETVNELAGSPAIKKGIYQSLKIVDELVAIMGYAPKRIVVEMARENQTTSTGKRRSIQRLKIVEKAMAEIGSNLLKEQPTTNEQLRDTRLFLYYMQNGKDMYTGDELSLHRLSHYDIDHIIPQSFMKDDSLDNLVLVGSTENRGKSDDVPSKKVVKKMKAYWEKLYAAGLISQRKFQRLTKGEQGGLTLEDKAHFIQRQLVETRQITKNVAGILDQRYNAKSKEKKVQIITLKASLTSQFRSIFGLYKVREVNDYHHGQDAYLNCVVATTLLKVYPNLAPEFVYGEYPKFQAFKENKATAKTIIYTNLMRFFTEDEPRFTKDSEILWSNSYLKTIKKELNYHQMNIVKKVEVQKGGFSKESIKPKGPSNKLIPVKNGLDPQKYGGFDSPVVAYTVLFTHEKGKKPLIKQEILGITIMEKTRFEQNPILFLEEKGFLRPRVLMKLPKYTLYEFPEGRRRLLASAKEAQKGNQMVLPEHLLTLLYHAKQCLLPNQSESLAYVEQHQPEFQEILERVVDFAEVHTLAKSKVQQIVKLFEANQTADVKEIAASFIQLMQFNAMGAPSTFKFFQKDIERARYTSIKEIFDATIIYQSTTGLYETRRKVVD

SEQ ID NO: 411 - protein, 1150 aa, Enterococcus faecalis
MYSIGLDLGISSVGWSVIDERTGNVIDLGVRLFSAKNSEKNLERRTNRGGRRLIRRKTNRLKDAKKILAAVGFYEDKSLKNSCPYQLRVKGLTEPLSKGEIYKVTLHILKKRGISYLDEDDTEAAKESQDYKEQVRENAQLLTKYTPGQIQLQRLKENNRVKTGINAQGNYQLNVFKVSAYANELATILKTQQAFYPNELTDDWIALFVQPGIAEEAGLIYRKRPYYHGPGNEANNSPYGRWSDFKKTGQPATNIFDKLIGKDFQGELRASGLSLSAQQYNLLNDLTNLKIDGEIPLSPEQKEYILAELMTKEFTRFGVNDVVKLLGVKKERLSGWRLDKKGKPEIHTLKGYRNWRKIFAESGIDLAMLPTETIDCLAKILTLNTEREGIENTLAFELPELAESVKLLVLDRYKELSQSVSTQAWHRFSLKTLHLLIPELMNATSEQNTLLEQFQLKSDVRKRYSEYKKLPTKDVLTEIYNPTVNKTVSQAFKVIDALLVKYGKEQIRYITIEMPRDDNEEDEKKRIKELHAKNSQRKNDSQSYFMQKSGWSQEKFQTTIQKNRRFLAKLLYYYEQDGICAYTGLSISPELLVSDSTEIDHIIPISISLDDSINNKVLVLSKANQVKGQQTPYDAWMDGSFKKINGKFSNWDDYQKWVESRHFSHKKENNLLETRNIFDSEQVEKFLARNLNDTRYASRLVLNTLQSFFANQETKVRVVNGSFTHTLRKKWGADLDKTRETHHHHAVDATLCAVTPFVKVSRYHYAVKEETGEKVMREIDFETGEIVDEMSYREFKKSKKYERKTYQVKWPNFREQLKPVNLHPRIKFSHQVDRKANRKLSDATIYSVREKTEVKTLKSGKQKITTDEYTIGKIKDIYTVDGWEAFKKKQDKLLMKDLDEKTYERLLSIAETTPDFQEVEEKNGKVKRVKRSPFAVYCEENDIPAIRKYAKKNNGPLIRSLKYYDGKLNKHINITKDSQGRPVEKTKNGRKVTLQSLKPYRYDIYQDLETKAYYTVQLYYSDLRFVEGKYGITEKEYMKKVAEQTKGQVVRFCFSLQKNDGLEIEWKDSQRYDVRFYNFQSANSINFKGLEQEMMPAENQFKQKPYNNGAINLNIAKYGKEGKKLRKFNTDILGKKHYLYYEKEPKNIIK

SEQ ID NO: 412 - protein, 1150 aa, Enterococcus faecalis
MYSIGLDLGISSVGWSVIDERTGNVIDLGVRLFSAKNSEKNLERRTNRGGRRLIRRKTNRLKDAKKILAAVGFYEDKSLKNSCPYQLRVKGLTEPLSKGEIYKVTLHILKKRGISYLDEDDTEAAKESQDYKEQVRKNAQLLTKYTPGQIQLQRLKENNRVKTGINAQGNYQLNVFKVSAYANELATILKTQQAFYPNELTDDWIALFVQPGIAEEAGLIYRKRPYYHGPGNEANNSPYGRWSDFKKTGQPATNIFDRLIGKDFQGELRASGLSLSAQQYNLLNDLTNLKIDGEIPLSPEQKEYILAELMTKEFTRFGVNDVAKLLGVKKERLSGWRLDKKGKPEIHTLKGYRNWRKIFAESGIDLATLPTETIDCLAKVLTLNTEHEGIENTLAFELPELAESVKLLVLDRYKELSQSVSTQAWHRFSLKTLHLLIPELMNATSEQNTLLEQFQLKSDVRKRYSEYKKLPTKDVLTEIYNPTVNKTVSQAFKVIDALLVKYGKEQIRYITIEMPRDDNEEDEKKRIKELHAKNSQRKNDSQSYFMQKSGWSQEKFQTTIQKNRRFLAKLLYYYEQDGICAYTGLSISPELLVSDSTEIDHIIPISISLDDSINNKVLVLSKANQVKGQQTPYDAWMDGSFKKINGKFSNWDDYQKWVESRHFSHKKENNLLETRNIFDSEQVEKFLARNLNDTRYASRLVLNTLQSFFANHETKVRVVNGSFTHTLRKKWGADLDKTRETHHHHAVDATLCAVTPFVKVSRYHYAVKEETGEKVMREIDFETGEIVDEMSYQEFKKSKKYERKTYQVKWPNFREQLKPVNLHPRIKFSHQVDRKANRKLSDATIYSVREKTEVKTLKSGKQKITTDEYTIGKIKDIYTVDGWEAFKKKQDKLLMKDLDEKTYERLLSIAETTPDFQEVEEKNGKVKRVKRSPFAVYCEENDIPAIQKYAKKNNGPLIRSLKYYDGKLNKHINITKDSQGRPVEKTKNGRKVTLQSLKPYRYDIYQDLETKAYYTVQLYYSDLRFVEGKYGITEKEYMKKVAEQTKGQVVRFCFSLQKNDGLEIEWKDSQRYDVRFYNFQSANSINFKGLEQEMMPAENQFKQKPYNNGAINLNIAKYGKEGKKLRKFNTDILGKKHYLYYEKEPKNIIK

SEQ ID NO: 413 - protein, 1150 aa, Enterococcus faecalis
MYSIGLDLGISSVGWSVIDERTGNVIDLGVRLFSAKNSEKNLERRTNRGGRRLIRRKTNRLKDAKKILAAVGFYEDKSLKNSCPYQLRVKGLTEPLSKGEIYKVTLHILKKRGISYLDEDDTEAAKESQDYKEQVRKNAQLLTKYTPGQIQLQRLKENNRVKTGINVQGNYQLNVFKVSAYANELATILKTQQAFYPNELTDDWIALFVQPGIAEEAGLIYRKRPYYHGPGNEANNSPYGRWSDFQKTGEPATNIFDKLIGKDFQGELRASGLSLSAQQYNLLNDLTNLKIDGEVPLSSEQKEYILTELMTKEFTRFGVNDVVKLLGVKKERLSGWRLDKKGKPEIHTLKGYRNWRKIFAEAGIDLATLPTETIDCLAKVLTLNTEREGIENTLAFELPELSESVKLLVLDRYKELSQSISTQSWHRFSLKTLHLLIPELMNATSEQNTLLEQFQLKSDVRKRYSEYKKLPTKDVLAEIYNPTVNKTVSQAFKVIDALLVKYGKEQIRYITIEMPRDDNEEDEKKRIKELHAKNSQRKNDSQSYFMQKSGWSQEKFQTTIQKNRRFLAKLLYYYEQDGICAYTGLPISPELLVSDSTEIDHIIPISISLDDSINNKVLVLSKANQVKGQQTPYDAWMDGSFKKINGKFSNWDDYQKWVESRHFSHKKENNLLETRNIFDSEQVEKFLARNLNDTRYASRLVLNTLQSFFTNQETKVRVVNGSFTHTLRKKWGADLDKTRETHHHHAVDATLCAVTPFVKVSRYHYAVKEETGEKVMREIDFETGEIVNEMSYREFKKSKKYERKTYQVKWPNFREQLKPVNLHPRIKFSHQVDRKANRKLSDATIYSVREKTEVKTLKSGKQKITTDEYTIGKIKDIYTLDGWEAFKKKQDKLLMKDLDEKTYERLLSIAETTPDFQEVEEKNGKVKRVKRSPFAVYCEENDIPAIQKYAKKNNGPLIRSLKYYDGKLNKHINITKDSQGRPVEKTKNGRKVTLQSLKPYRYDIYQDLETKAYYTVQLYYSDLRFVEGKYGITEKEYMKKVAEQTKGQVVRFCFSLQKNDGLEIEWKDSQRYDVRFYNFQSANSINFKGLEQEIMPAENQFKQKPYNNGAINLNIAKYGKEGKKLRKFNTDILGKKHYLFYEKEPKNIIK

SEQ ID NO: 414 - protein, 1150 aa, Enterococcus faecalis; identical to SEQ ID NO: 183

SEQ ID NO: 415 - protein, 1150 aa, Enterococcus faecalis; identical to SEQ ID NO: 184

SEQ ID NO: 416 - protein, 1340 aa, Enterococcus faecium
MKKEYTIGLDIGTNSVGWSVLTDDYRLVSKKMKVAGNTEKSSTKKNFWGVRLFDEGQTAEARRSKRTARRRLARRRQRILELQKIFAPEILKIDEHFFARLNESFLVLDEKKQSRHPVFATIKQEKSYHQTYPTIYHLRQALADSSEKADIRLVYLAMAHLLKYRGHFLIEGELNTENSSVTETFRQFLSTYNQQFSEADDKQTEKLDEAVDCSFVFTEKMSKTKKAETLLKYFPHEKSNGYLSQFIKLMVGNQGNFKNVFGLEEEAKLQFSKETYEEDLEELLEKIGDDYIDLFVQAKNVYDAVLLSEILSDSTKNTRAKLSAGMIRRYDAHKEDLVLLKRFVKENLPKKYRAFFGDNSVNGYAGYIEGHATQEDFYKFVKKELTGIRGSEVFLTKIEQENFLRKQRTFDNGVIPHQIHLTELRAIIANQKKHYPFLKEEQEKLESLLTFKIPYYVGPLAKKQENSPFAWLIRKSEEKIKPWNLPEIVDMEGSAVRFIERMNNTDMYIPHNKVLPKNSLLYQKFSIYNELTKVRYQDERGQMNYFSSIEKKEIFHELFEKNRKVTKKDLQEFLYLKYDIKHAELSGIEKAFNASYTTYHDFLTMSENKREMKQWLEDPELASMFEEIIKTLTVFEDREMIKTRLSHHEATLGKHIIKKLTKKHYTGWGRLSKELIQGIRDKQSNKTILDYLINDDDFPHHRNRNFMQLINDDSLSFKKEIKKAQMITDTENLEEIVKELTGSPAIKKGILQSLKIVDEIVGIMGYEPANIVVEMARENQTTGRGLKSSRPRLKALEESLKDFGSQLLKEYPTDNSSLQKDRLYLYYLQNGRDMYTGAPLDIHRLSDYDIDHIIPRSFTTDNSIDNKVLVSSKENRLKKDDVPSEKVVKKMRSFWYDLYSSKLISKRKLDNLTKIKLTEEDKAGFIKRQLVETRQITKHVAGILHHRFNKAEDTNEPIRKVRIITLKSALVSQFRNRFGIYKVREINEYHHAHDAYLNGVVALALLKKYPQLAPEFVYGEYLKFNAHKANKATVKKEFYSNIMKFFESDTPVCDENGEIFWDKSKSIAQVKKVINHHHMNIVKKTEIQKGGFSKETVEPKKDSSKLLPRKNNWDPAKYGGLGSPNVAYTVAFTYEKGKARKRTNALEGITIMEREAFEQSPVLFLKNKGYEQAEIEMKLPKYALFELENGRKRMVASNKEAQKANSFLLPEHLVTLLYHAKQYDEISHKESFDYVNEHHKEFSEVFARVLEFAGKYTLAEKNIEKLEKIYKENQTDDLAKLASSFVNLMQFNAMGAPADFKFFDVTIPRKRYTSLTEIWQSTIIHQSITGLYETRIRMGK

SEQ ID NO: 417 - protein, 1339 aa, Enterococcus faecium
MKKEYTIGLDIGTNSVGWSVLTDDYRLVSKKMKVAGNTEKSSTKKNFWGVRLFDEGQTAEARRSKRTARRRLARRRQRILELQKIFAPEILKIDEHFFARLNESFLVLDEKKQSRHPVFATIKQEKSYHQTYPTIYHLRQALADSSEKADIRLVYLAMAHLLKYRGHFLIEGELNTENSSVTETFRQFLSTYNQQFSEADDKQTEKLDEAVDCSFVFTEKMSKTKKAETLLKYFPHEKSNGYLSQFIKLMVGNQGNFKNVFGLEEAKLQFSKETYEEDLEELLEKIGDDYIDLFVQAKNVYDAVLLSEILSDSTKNTRAKLSAGMIRRYDAHKEDLVLLKRFVKENLPKKYRAFFGDNSVNGYAGYIEGHATQEDFYKFVKKELTGIRGSEVFLTKIEQENFLRKQRTFDNGVIPHQIHLTELRAIIANQKKHYPFLKEEQEKLESLLTFKIPYYVGPLAKKQENSPFAWLIRKSEEKIKPWNLPEIVDMEGSAVRFIERMINTDMYMPHNKVLPKNSLLYQKFSIYNELTKVRYQDERGQMNYFSSIEKKEIFHELFEKNRKVTKKDLQEFLYLKYDIKHAELSGIEKAFNASYTTYHDFLTMSENKREMKQWLEDPELASMFEEIIKTLTVFEDREMIKTRLSHHEATLGKHIIKKLTKKHYTGWGRLSKELIQGIRDKQSNKTILDYLINDDDFPHHRNRNFMQLINDDSLSFKKEIKKAQMITDTENLEEIVKELTGSPAIKKGILQSLKIVDEIVGIMGYEPANIVVEMARENQTTGRGLKSSRPRLKALEESLKDFGSQLLKEYPTDNSSLQKDRLYLYYLQNGRDMYTGAPLDIHRLSDYDIDHIIPRSFTTDNSIDNKVLVSSKENRLKKDDVPSEKVVKKMRSFWYDLYSSKLISKRKLDNLTKIKLTEEDKAGFIKRQLVETRQITKHVAGILHHRFNKAEDTNEPIRKVRIITLKSALVSQFRNRFGIYKVREINEYHHAHDAYLNGVVALALLKKYPQLAPEFVYGEYLKFNAHKANKATVKKEFYSNIMKFFESDTPVCDENGEIFWDKSKSIAQVKKVINHHHMNIVKKTEIQKGGFSKETVEPKKDSSKLLPRKNNWDPAKYGGLGSPNVAYTVAFTYEKGKARKRTNALEGITIMEREAFEQSPVLFLKNKGYEQAEIEMKLPKYALFELENGRKRMVASNKEAQKANSFLLPEHLVTLLYHAKQYDEISHKESFDYVNEHHKEFSEVFARVLEFAGKYTLAEKNIEKLEKIYKENQTDDLAKLASSFVNLMQFNAMGAPADFKFFDVTIPRKRYTSLTEIWQSTIIHQSITGLYETRIRMGK

SEQ ID NO: 418 - protein, 1340 aa, Enterococcus faecium
MKKEYTIGLDIGTNSVGWSVLTDDYRLVSKKMKVAGNTEKSSTKKNFWGVRLFDEGQTAEARRSKRTARRRLARRRQRILELQKIFAPEILKIDEHFFARLNESFLVLDEKKQSRHPVFATIKQEKSYHQTYPTIYHLRQALADSSEKADIRLVYLAMAHLLKYRGHFLIEGELNTENSSVTETFRQFLSTYNQQFSEADDKQTEKLDEAVDCSFVFTEKMSKTKKAETLLKYFPHEKSNGYLSQFIKLMVGNQGNFKNVFGLEEEAKLQFSKETYEEDLEELLEKIGDDYIDLFVQAKNVYDAVLLSEILSDSTKNTRAKLSAGMIRRYDAHKEDLVLLKRFVKENLPKKYRAFFGDNSVNGYAGYIEGHATQEDFYKFVKKELTGIRGSEVFLTKIEQENFLRKQRTFDNGVIPHQIHLTELRAIIANQKKHYPFLKEEQEKLESLLTFKIPYYVGPLAKKQENSPFAWLIRKSEEKIKPWNLPEIVDMEGSAVRFIERMINTDMYIPHNKVLPKNSLLYQKFSIYNELTKVRYQDERGQMNYFSSIEKKEIFHELFEKNRKVTKKDLQEFLYLKYDIKHAELSGIEKAFNASYTTYHDFLTMSENKREMKQWLEDPELASMFEEIIKTLTVFEDREMIKTRLSHHEATLGKHIIKKLTKKHYTGWGRLSKELIQGIRDKQSNKTILDYLINDDDFPHHRNRNFMQLINDDSLSFKKEIKKAQMITDTENLEEIVKELTGSPAIKKGILQSLKIVDEIVGIMGYEPANIVVEMARENQTTGRGLKSSRPRLKALEESLKDFGSQLLKEYPTDNSSLQKDRLYLYYLQNGRDMYTGAPLDIHRLSDYDIDHIIPRSFTTDNSIDNKVLVSSKENRLKKDDVPSEKVVKKMRSFWYDLYSSKLISKRKLDNLTKIKLTEEDKAGFIKRQLVETRQITKHVAGILHHRFNKAEDTNEPIRKVRIITLKSALVSQFRNRFGIYKVREINEYHHAHDAYLNGVVALALLKKYPQLAPEFVYGEYLKFNAHKANKATVKKEFYSNIMKFFESDTPVCDENGEIFWDKSKSIAQVKKVINHHHMNIVKKTEIQKGGFSKETVEPKKDSSKLLPRKNNWDPAKYGGLGSPNVAYTVAFTYEKGKARKRTNALEGITIMEREAFEQSPVLFLKNKGYEQAEIEMKLPKYALFELENGRKRMVASNKEAQKANSFLLPEHLVTLLYHAKQYDEISHKESFDYVNEHHKEFSEVFARVLEFAGKYTLAEKNIEKLEKIYKENQTDDLAKLASSFVNLMQFNAMGAPADFKFFDVTIPRKRYTSLTEIWQSTIIHQSITGLYETRIRMGK

SEQ ID NO: 419 - protein, 1340 aa, Enterococcus faecium
MKKEYTIGLDIGTNSVGWSVLTDDYRLVSKKMKVAGNTEKSSTKKNFWGVRLFDEGQTAEARRSKRTARRRLARRRQRILELQKIFAPEILKIDEHFFARLNESFLVLDEKKQSRHPVFATIKQEKSYHQTYPTIYHLRQALADSSEKADIRLVYLAMAHLLKYRGHFLIEGELNTENSSVTETFRQFLSTYNQQFSEADDKQTEKLDEAVDCSFVFTEKMSKTKKAETLLKYFPHEKSNGYLSQFIKLMVGNQGNFKNVFGLEEEAKLQFSKETYEEDLEELLEKIGDDYIDLFVQAKNVYDAVLLSEILSDSTKNTRAKLSAGMIRRYDAHKEDLVLLKRFVKENLPKKYRAFFGDNSVNGYAGYIEGHATQEDFYKFVKKELTGIRGSEVFLTKIEQENFLRKQRTFDNGVIPHQIHLTELRAIIANQKKHYPFLKEEQEKLESLLTFKIPYYVGPLAKKQENSPFAWLIRKSEEKIKPWNLPEIVDMEGSAVRFIERMINTDMYMPHNKVLPKNSLLYQKFSIYNELTKVRYQDERGQMNYFSSIEKKEIFHELFEKNRKVTKKDLQEFLYLKYDIKHAELSGIEKAFNASYTTYHDFLTMSENKREMKQWLEDPELASMFEEIIKTLTVFEDREMIKTRLSHHEATLGKHIIKKLTKKHYTGWGRLSKELIQGIRDKQSNKTILDYLINDDDFPHHRNRNFMQLINDDSLSFKKEIKKAQMITDTENLEEIVKELTGSPAIKKGILQSLKIVDEIVGIMGYEPANIVVEMARENQTTGRGLKSSRPRLKALEESLKDFGSQLLKEYPTDNSSLQKDRLYLYYLQNGRDMYTGAPLDIHRLSDYDIDHIIPRSFTTDNSIDNKVLVSSKENRLKKDDVPSEKVVKKMRSFWYDLYSSKLISKRKLDNLTKIKLTEEDKAGFIKRQLVETRQITKHVAGILHHRFNKAEDTNEPIRKVRIITLKSALVSQFRNRFGIYKVREINEYHHAHDAYLNGVVALALLKKYPQLAPEFVYGEYLKFNAHKANKATVKKEFYSNIMKFFESDTPVCDENGEIFWDKSKSIAQVKKVINHHHMNIVKKTEIQKGGFSKETVEPKKDSSKLLPRKNNWDPAKYGGLGSPNVAYTVAFTYEKGKARKRTNALEGITIMEREAFEQSPVLFLKNKGYEQAEIEMKLPKYALFELENGRKRMVASNKEAQKANSFLLPEHLVTLLYHAKQYDEISHKESFDYVNEHHKEFSEVFARVLEFAGKYTLAEKNIEKLEKIYKENQTDDLAKLASSFVNLMQFNAMGAPADFKFFDVTIPRKRYTSLTEIWQSTIIHQSITGLYETRIRMGK

SEQ ID NO: 420 - protein, 1339 aa, Enterococcus faecium
MKKEYTIGLDIGTNSVGWSVLTDDYRLVSKKMKVAGNTEKSSTKKNFWGVRLFDEGQTAEARRSKRTARRRLARRRQRILELQKIFAPEILKIDEHFFARLNESFLVLDEKKQSRHPVFATIKQEKSYHQTYPTIYHLRQALADSSEKADIRLVYLAMAHLLKYRGHFLIEGELNTENSSVTETFRQFLSTYNQQFSEADDKQTEKLDEAVDCSFVFTEKMSKTKKAETLLKYFPHEKSNGYLSQFIKLMVGNQGNFKNVFGLEEAKLQFSKETYEEDLEELLEKIGDDYIDLFVQAKNVYDAVLLSEILSDSTKNTRAKLSAGMIRRYDAHKEDLVLLKRFVKENLPKKYRAFFGDNSVNGYAGYIEGHATQEDFYKFVKKELTGIRGSEVFLTKIEQENFLRKQRTFDNGVIPHQIHLTELRAIIANQKKHYPFLKEEQEKLESLLTFKIPYYVGPLAKKQENSPFAWLIRKSEEKIKPWNLPEIVDMEGSAVRFIERMINTDMYIPHNKVLPKNSLLYQKFSIYNELTKVRYQDERGQMNYFSSIEKKEIFHELFEKNRKVTKKDLQEFLYLKYDIKHAELSGIEKAFNASYTTYHDFLTMSENKREMKQWLEDPELASMFEEIIKTLTVFEDREMIKTRLSHHEATLGKHIIKKLTKKHYTGWGRLSKELIQGIRDKQSNKTILDYLINDDDFPHHRNRNFMQLINDDSLSFKKEIKKAQMITDTENLEEIVKELTGSPAIKKGILQSLKIVDEIVGIMGYEPANIVVEMARENQTTGRGLKSSRPRLKALEESLKDFGSQLLKEYPTDNSSLQKDRLYLYYLQNGRDMYTGAPLDIHRLSDYDIDHIIPRSFTTDNSIDNKVLVSSKENRLKKDDVPSEKVVKKMRSFWYDLYSSKLISKRKLDNLTKIKLTEEDKAGFIKRQLVETRQITKHVAGILHHRFNKAEDTNEPIRKVRIITLKSALVSQFRNRFGIYKVREINEYHHAHDAYLNGVVALALLKKYPQLAPEFVYGEYLKFNAHKANKATVKKEFYSNIMKFFESDTPVCDENGEIFWDKSKSIAQVKKVINHHHMNIVKKTEIQKGGFSEETVEPKKDSSKLLPRKNNWDPAKYGGLGSPNVAYTVAFTYEKGKARKRTNALEGITIMEREAFEQSPVLFLKNKGYEQAEIEMKLPKYALFELENGRKRMVASNKEAQKANSFLLPEHLVTLLYHAKQYDEISHKESFDYVNEHHKEFSEVFARVLEFAGKYTLAEKNIEKLEKIYKENQTDDLAKLASSFVNLMQFNAMGAPADFKFFDVTIPRKRYTSLTEIWQSTIIHQSITGLYETRIRMGK

SEQ ID NO: 421 - protein, 1340 aa, Enterococcus faecium
MKKEYTIGLDIGTNSVGWSVLTDDYRLVSKKMKVAGNTEKSSTKKNFWGVRLFDEGQTAEARRSKRTARRRLARRRQRILELQKIFAPEILKIDEHFFARLNESFLVLDEKKQSRHPVFATIKQEKSYHQTYPTIYHLRQALADSSEKADIRLVYLAMAHLLKYRGHFLIEGELNTENSSVTETFRQFLSTYNQQFSEADDKQTEKLDEAVDCSFVFTEKMSKTKKAETLLKYFPHEKSNGYLSQFIKLMVGNQGNFKNVFGLEEEAKLQFSKETYEEDLEELLEKIGDDYIDLFVQAKNVYDAVLLSEILSDSTKNTRAKLSAGMIRRYDAHKEDLVLLKRFVKENLPKKYRAFFGDNSVNGYAGYIEGHATQEDFYKFVKKELTGIRGSEVFLTKIEQENFLRKQRTFDNGVIPHQIHLTELRAIIANQKKHYPFLKEEQEKLESLLTFKIPYYVGPLAKKQENSPFAWLIRKSEEKIKPWNLPEIVDMEGSAVRFIERMINTDMYIPHNKVLPKNSLLYQKFSIYNELTKVRYQDERGQMNYFSSIEKKEIFHELFEKNRKVTKKDLQEFLYLKYDIKHAELSGIEKAFNASYTTYHDFLTMSENKREMKQWLEDPELASMFEEIIKTLTVFEDREMIKTRLSHHEATLGKHIIKKLTKKHYTGWGRLSKELIQGIRDKQSNKTILDYLINDDDFPHHRNRNCMQLINDDSLSFKKEIKKAQMITDTENLEEIVKELTGSPAIKKGILQSLKIVDEIVGIMGYEPANIVVEMARENQTTGRGLKSSRPRLKALEESLKDFGSQLLKEYPTDNSSLQKDRLYLYYLQNGRDMYTGAPLDIHRLSDYDIDHIIPRSFTTDNSIDNKVLVSSKENRLKKDDVPSEKVVKKMRSFWYDLYSSKLISKRKLDNLTKIKLTEEDKAGFIKRQLVETRQITKHVAGILHHRFNKAEDTNEPIRKVRIITLKSALVSQFRNRFGIYKVREINEYHHAHDAYLNGVVALALLKKYPQLAPEFVYGEYLKFNAHKANKATVKKEFYSNIMKFFESDTPVCDENGEIFWDKSKSIAQVKKVINHHHMNIVKKTEIQKGGFSKETVEPKKDSSKLLPRKNNWDPTKYGGLGSPNVAYTVAFTYEKGKARKRTNALEGITIMEREAFEQSPVLFLKNKGYEQAEIEMKLPKYALFELENGRKRMVASNKEAQKANSFLLPEHLVTLLYHAKQYDEISHKESFDYVNEHHKEFSEVFARVLEFAGKYTLAEKNIEKLEKIYKENQTDDLAKLASSFVNLMQFNAMGAPADFKFFDVTIPRKRYTSLTEIWQSTIIHQSITGLYETRIRMGK

SEQ ID NO: 422 - protein, 892 aa, Enterococcus faecium
MTFKIPYYVGPLAKKQENSPFAWLIRKSEEKIKPWNLPEIVDMEGSAVRFIERMINTDMYMPHNKVLPKNSLLYQKFSIYNELTKVRYQDERGQMNYFSSIEKKEIFHELFEKNRKVTKKDLQEFLYLKYDIKHAELSGIEKAFNASYTTYHDFLTMSENKREMEQWLEDPELASMFEEIIKTLTVFEDREMIKTRLSHHKATLGKHIIKKLTKKHYTGWGRLSKELIQGIRDKQSNKTILDYLINDDDFPHHRNRNFMQLINDDSLSFKKEIKKAQMITDTENLEEIVKELTGSPAIKKGILQSLKIVDEIVGIMGYEPANIVVEMARENQTTGRGLKSSRPRLKALEESLKDFGSQLLKEYPTDNSSLQKDRLYLYYLQNGRDMYTGAPLDIHRLSDYDIDHIIPRSFTTDNSIDNKVLVSSKENRLKKDDVPSEKVVKKMRSFWYDLYSSKLISKRKLDNLTKIKLTEEDKAGFIKRQLVETRQITKHVAGILHHRFNKAEDTNEPIRKVRIITLKSALVSQFRNRFGIYKVREINEYHHAHDAYLNGVIALALLKKYPQLAPEFVYGEYLKFNAHKANKATVKKEFYSNIMKFFESDTPVCDENGEIFWDKSKSIAQVKKVINHHHMNIVKKTEIQKGGFSKETVEPKKDSSKLLPRKNNWDPAKYGGLGSPNVAYTVAFTYEKGKARKRTNALEGITIMEREAFEQSPVLFLKNKGYEQAEIEMKLPKYALFELENGRKRMVASNKEAQKANSFLLPEHLVTLLYHAKQYDEISHKESFDYVNEHHKEFSEVFARVLEFAGKYTLAEKNIEKLEKIYKENQTDDLAKLASSFVNLMQFNAMGAPADFKFFDVTIPRKRYTSLTEIWQSTIIHQSITGLYETRIRMGK

SEQ ID NO: 423 - protein, 1336 aa, Enterococcus hirae
MTKDYTIGLDIGTNSVGWAVLTDDYQLMKRKMSVHGNTEKKKIKKNFWGARLFDEGQTAEFRRTKRTNRRRLARRKYRLSKLQDLFAEELCKQDDCFFVRLEESFLVPEEKQYKPASIFPTLEEEKEYYQKYPTIYHLRQKLVDSTEKEDLRLVYLALAHLLKYRGHFLFEGDLDTENTSIEESFRVFLEQYSKQSDQPLIVHQPVLTILTDKLSKTKKVEEILKYYPTEKINSFFAQCLKLIVGNQANFKRIFDLEAEVKLQFSKETYEEDLESLLEKIGDEYLDIFLQAKKVHDAILLSEIISSTVKHTKAKLSSGMVERYERHKADLAKFKQFVKENVPQKATVFFKDTTKNGYAGYIKGKTTQEEFYKFVKKELSGVVGSEPFLEKIDQETFLLKQRTYTNGVIPHQVHLIELKAIIDQQKQHYPFLEEAGPKIIALFKFRIPYYVGPLAKEQEASSFAWIERKTAEKINPWNFSEVVDIEKSAMRFIQRMTKQDTYLPTEKVLPKNSLLYQKYMIFNELTKVSYKDERGVKQYFSGDEKQQIFKQLFQKERGKITVKKLQNFLYTHYHIENAQIFGIEKAFNASYSTYHDFMKLAKTNQKAMQEWLEQPEMEPIFEDIVKILTIFEDRQMIKHQLSKYQEVFGEKLLKEFARKHYTGWGRFSAKLIHGIRDRKTNKTILDYLINDDDVPANRNRNLMQLINDEHLSFKEEIAKATVFSKHKSLVDVIQDLPGSPAIKKGIWQSLKIVEELIAIIGYKPKNIVIEMARENQKTHRTSPRLKALENGLKQIGSTLLKEQPTDNKALQKERLYLYYLQNGRDMYTGEPLEIENLHQYEVDHIIPRSFIVDNSIDNKVLVASKQNQKKRDDVPKKQIVNEQRIFWNQLKEAKLISPKKYAYLTKIELTPEDKARFIQRQLVETRQITKHVANILHQSFNQEEEGTDCDGVQIITLKATLTSQFRQTFGLYKVREINPHHHAHDAYLNGFIANVLLKRYPKLAPEFVYGKYVKYSLARENKATAKKEFYSNILKFLESDEPFCDENGEIYWEKSHHLPRIKKVLSSHQVNVVKKVEQQKGGFYKETVNSKEKPDKLIERKNNWDVTKYGGFGSPVIAYAIAFVYAKGKTQKKTRAIEGITIMEQAAFEKDPTTFLKEKGFPQVTEFIKLPKYTLFEFDNGRRRFLASHKESQKGNPFILSDQLVTLLYHAQHYDKITYQESFDYVNTHLSDFSAILTEVLAFAEKYTLADKNIERIQELYEENKYGETSMIAQSFLQLLQFNAIGAPADFKFFGVTIPRKRYTSLTEIWDATIIYQSVTGLYETRIRMGDLWAGEQ

SEQ ID NO: 424 - protein, 116 aa, Enterococcus sp.
MYSIGLDLGISSVGWSVIDERTGNVIDLGVRLFSAKNSEKNLERRTNRGGRRLIRRKTNRLKDAKKILAAVGFYEDKSLKNSCPYQLRVKGLTELLSKGEIYKVTLHILKNVELVT

SEQ ID NO: 425 - protein, 1391 aa, Eubacterium sp.
MENKQYYIGLDVGTNSVGWAVTDTSYNLLRAKGKDMWGARLFDEAKTAVERRTKRTSRRRSEREKARKAMLKELFADEINKVDPNFFIRLEESKFFLDDRSENNRQRYTLFNDAKFTDKDYYEKYKTIFHLRSALINSDEKFDVRLVFLAILNLFSHRGHFLNASLKGDGEIQGVDIFYNDLYEVCEEFEIDLPQISNIDNFEKILSQKGKSRTKILEELSEELSISKKEKIKYSLLKLICGMKIKVVDIYADEDIQEDDKKKDLGFRESDYEKSSLEVKEIIGDDHFELIERAKAVHDIGLLANIIGNSKYLCEARVEAYDNHHKDLQKIKELLKKYDIKAYTDMFRKMTDKNYSAYVGSVNSNIAKERRSVDNRKIEDLYEYIKKIALKNISDDNEDKIEILKKIETGEFLKKQLTASNGVIPNQLQSRELRAILKKAENYLPFLKEKGEKNLTVSEMIIQLFEFQIPYYVGPLDKNPKKDKNANSWAVIPSGGRILPWNFEDKVDVKGSRKEFIEKMVRKCTYLSEEHTLPKQSLLYEKFMVLNEINNIKIDGEKISVEAKQKIYNDLFMKGKKVSQKAIKQELISLNIMSKDSVLSGIDTVCNAYLSSIAKFRGVFDENVNNQSTIDMIEDIIFLKTVYSDEKRFVKEEIVEKYGDEIDKDKIKRILGFKFSNWGNISKSFLELEGADVGTGEIRSIIQSLWETNFNLMELLSSRFTYMDELEKRVKKLEKPLSEWTIEDLDDMYLSSPVKRMIWQSMKIVDEIQTVIGYAPKRIFVEMTRSEGEKVRTKSRKDRLKELYSAIKEDSKQWVKELDAKDESYFRSKKMYLYYLQKGRCMYSGEVIELDKLMDDNLYDIDHIYPRSFVKDDSLDNLVLVKKEINNRKQNDPITPQIQASCQGFWKVLHEQGFISNEKYSRLTRKTQEFSDEEKLSFINRQIVETGQATKCMAQILQKSMGEDVDVVFSKARLVSEFRHKFELFKSRLINDFHHANDAYLNIVVGNSYFVKFTRNPANFIKDARKNPDNPAYKYHMDRFFERDVKSKSEVAWIGQSEGNAGTIAIVKKTMSKNSPLITKKVEEGHGSITKETIVGVKEIKFGRNKVEKADKTPKKANLQAYRPIKTSDERLCNILRYGGRTSISISGYCLVEYVKKRKTIRSLEAIPVYLGRKDSLSEEKLLNYFRYNLNDGGKDSVSDIRLCLPFISTNSLVKIDGYLYYLGGKNDDRIQLYNAYQLKMKKEEVEYIRKIEKAVSMSKFDEIDREKNPVLTEEKNIELYNKIQDKFENTVFSKRMSLVKYNKKDLSFGDFLKNKKSKFEEIDLEKQCKVLYNIIFNLSNLKEVDLSDIGGSKSTGKCRCKKNITNYKEFKLIQQSITGLYSCEKDLMTI

SEQ ID NO: 426 - protein, 1391 aa, Eubacterium yurii
MENKQYYIGLDVGTNSVGWAVTDTSYNLLRAKGKDMWGARLFEKANTAAERRTKRTSRRRSEREKARKAMLKELFADEINRVDPSFFIRLEESKFFLDDRSENNRQRYTLFNDATFTDKDYYEKYKTIFHLRSALINSDEKFDVRLVFLAILNLFSHRGHFLNASLKGDGDIQGMDVFYNDLVESCEYFEIELPRITNIDNFEKILSQKGKSRTKILEELSEELSISKKDKSKYNLIKLISGLEASVVELYNIEDIQDENKKIKIGFRESDYEESSLKVKEIIGDEYFDLVERAKSVHDMGLLSNIIGNSKYLCEARVEAYENHHKDLLKIKELLKKYDKKAYNDMFRKMTDKNYSAYVGSVNSNIAKERRSVDKRKIEDLYKYIEDTALKNIPDDNKDKIEILEKIKLGEFLKKQLTASNGVIPNQLQSRELRAILKKAENYLPFLKEKGEKNLTVSEMIIQLFEFQIPYYVGPLDKNPKKDNKANSWAKIKQGGRILPWNFEDKVDVKGSRKEFIEKMVRKCTYISDEHTLPKQSLLYEKFMVLNEINNIKIDGEKISVEAKQKIYNDLFVKGKKVSQKDIKKELISLNIMDKDSVLSGTDTVCNAYLSSIGKFTGVFKEEINKQSIVDMIEDIIFLKTVYGDEKRFVKEEIVEKYGDEIDKDKIKRILGFKFSNWGNLSKSFLELEGADVGTGEVRSIIQSLWETNFNLMELLSSRFTYMDELEKRVKKLEKPLSEWTIEDLDDMYLSSPVKRMIWQSMKIVDEIQTVIGYAPKRIFVEMTRSEGEKVRTKSRKDRLKELYNGIKEDSKQWVKELDSKDESYFRSKKMYLYYLQKGRCMYSGEVIELDKLMDDNLYDIDHIYPRSFVKDDSLDNLVLVKKEINNRKQNDPITPQIQASCQGFWKILHDQGFMSNEKYSRLTRKTQEFSDEEKLSFINRQIVETGQATKCMAQILQKSMGEDVDVVFSKARLVSEFRHKFELFKSRLINDFHHANDAYLNIVVGNSYFVKFTRNPANFIKDARKNPDNPVYKYHMDRFFERDVKSKSEVAWIGQSEGNSGTIVIVKKTMAKNSPLITKKVEEGHGSITKETIVGVKEIKFGRNKVEKADKTPKKPNLQAYRPIKTSDERLCNILRYGGRTSISISGYCLVEYVKKRKTIRSLEAIPVYLGRKDSLSEEKLLNYFRYNLNDGGKDSVSDIRLCLPFISTNSLVKIDGYLYYLGGKNDDRIQLYNAYQLKMKKEEVEYIRKIEKAVSMSKFDEIDREKNPVLTEEKNIELYNKIQDKFENTVFSKRMSLVKYNKKDLSFGDFLKNKKSKFEEIDLEKQCKVLYNIIFNLSNLKEVDLSDIGGSKSTGKCRCKKNITNYKEFKLIQQSITGLYSCEKDLMTI

SEQ ID NO: 427 - protein, 1142 aa, Facklamia hominis
MYSVGLDIGIASCGYSIINDVNGNIVELGTLLFKSRNSDNNEERRTNRGSRRLINRRRTRLDDGKKLLAEKGFKQDSKLKHVCPYELRVKGLHEKLTQGEIYKVVLHILKKRGISYLDESDENSSGIDGASYKDQVNLNLNLQKELTPGQIQLKRLKENGRIKSGVTFENGYQLNVFSVSAYANELNKILTKQSEYYSEIDQIWIDRFTKNGYRKEAGLVYRKRPYYDGPGNEKNNSIYGRWANFKEDGHPKENIFDQLIGLDSVDSTQVRASASTLTAQKYNLLNDLNNLTIIEDDRKFTTDEKVSIINYLMTQDITRFGPKELAKFYQLEVDQIRGWRIDNKGNPEIHSLKVYRDWKKIFNTSSIDLTSIQTWVVDELANVITLNTEIPSTLATLKIKIPDIDQQILNFVENNFYELKKKTSKNSWHSFSLKTLNILIPELLNTSEEQNTILERLNLKFDLKNKYAEKNQIPVKELLEQIYNPTVTKSVHQSIKLFNEIIEKYGKNNISYVTIEMPRDKNDQDQKDTIKRINKLNSERKNDSEKYFLERSGWDTIRFESALKKPRFAEKLLFYYEQKGKCAYSGQDILAESLLNESCEVDHIIPLSISFDDSIHNKVLVTASSNQEKGQRTPYMAFIDGAKLGQSWDDFVAWVNSCGFHRKKVQNLLYEENIFNPDVQRGFVSRNLNDTRYASRIVLNAIQSFFYKQKDLTKVKVVNGSFTHTLRKKWGSSLDKNRDTYHHHAVDATLCAVTPFINIVKYEFFEEDGIKYMVDLTTGEKVAYSDYKKMKFYDKRAYVPIWDGFIKQLTPANLYPKIKFSHQVDSKWNRKISDATIYSTRKIVETKINKKGVAKETVKDIVIDKIKDIYTPEGWRKFKEKQDKLLMKNFDEKTYNKLIKIAKEYPEKKEVQTSNGKVSLVEVSPFKMYCEEQNVPAIRKYSKKGNGPYIRSLKFYDKELGKHINITKDSYGNDIERTIRNKKIILKNQNSWRTDVYYNSVNNCYELLGIKYCHLKFYRGKYGIPKSIYDELKKEDEISSESVFKFSLYRHDRVRFEKDGEYIEALFGSKNESNKNYLELSPIDKNKWLSKENVKFFGEVAASGRFIKGLKPGIKVIKQSTDYMGHVYAIHQEKLKFVLSDA

SEQ ID NO: 428 - protein, 1347 aa, Finegoldia magna
MKSEKKYYIGLDVGTNSVGWAVTDEFYNILRAKGKDLWGVRLFEKAKTAADTRTFRSGRRRNDRKGMRLQILREIFEDEIKKVDKDFYDRLDESKFWAEDKKVSGKYSLFNDKNFSDKQYFEKFPTIFHLRKYLMEEHGKVDIRYYFLAINQMMKRRGHFLIDGQISHVTDDKPLKEQLILLINDLLKIELEEELMDSIFEILADVNEKRTDKKNNLKELIKGQDFNKQEGNILNSIFESIVTGKAKIKNIISDEDILEKIKEDNKEDFVLTGDSYEENLQYFEEVLQENITLFNTLKSTYDFVILQSILKGKSTLSDAQVERYDEHKKDLEILKKVIKKYDEDGKLFKQVFKEDNGNGYVSYIGYYLNKNKKITAKKKISNIEFTKYVKGILEKQCDCEDEAVKYLLGKIEQENFLLKQISSINSVIPHQIHLFELDKILENLAKNYPSFNNKKEEFTKIEKIRKTFTFRIPYYVGPLNDYHKNNGGNAWIFRNKGEKIRPWNFEKIVDLHKSEEEFIKRMLNQCTYLPEETVLPKSSILYSEYMVLNELNNLRIKGKPLDTDVKLKLIEELFKKKTKVTLKSIRDYMIRNNFADKEDFDNSEKNLEIVSNMKSYIDFNNILGDKFELEMVEDLIEKITIHTGNKTLLKKYIEETYPDLSSSQIQKIINLKYKDWGRLSRKLLDGIKGRNKTDDVNTVINFMRNSSDNLMQIIEGKNYSFNEYIDNLRKKYIPQEISYEVVENLYVSPSVKKMIWQVIRVTEEITKVMGYDPDKIFIEMAKSEEEKKTTISRKNKLLDLYKAIKKDERDSQYEKLLTGLNKLDESELRSKKLYLYYTQMGRDMYTGEKIDLDKLFDSTHYDKDHIIPQSMKKDDSIINNLVLVNKNANQTTKGNIYPVPSSIRNNPDIYNYWKYLMEKEFISKEKYNRLIRNTPLTNEELGVFINRQLVETRQSTKAIKELFEKFYQKSKIIPVKASLASDLRKDMNTLKSREVNDLHHAHDAFLNIVAGDVWNREFTSNPINYVNENREGDKVKYSLSKYFTRPRKSKGKVIWTPEKGRKLIVDTLNKPSVLISNESHVKKGELFNATISGKKDYKKGKIYLPLKKDDRLKDVSKYGGYKAINGAFFFLVEHTKSKKRIRSIELFPLHLLSKFYEDKNTVLDYAINVLQLQDPKIIIDKINYRTEIIIDNFSYLISTKSNDGSITVKPNEQMYWRVDEISNLKKIENKYKKDAILTEEDRKIMESYIDKIYQQFKAGKYKNRRTTDTIIEKYEIIDLDTLDNKQLYQLLVAFISLSYKTSNNAVDFTVIGLGTECGKPRITNLPDNTYLVYKSITGIYEKRIRIK

SEQ ID NO: 429 - protein, 1348 aa, Finegoldia magna; identical to SEQ ID NO: 227

SEQ ID NO: 430 - protein, 1516 aa, Flavobacteriaceae bacterium
MLKQQKDKIIGMNKKILGLDLGTNSIGWALVKQDLENKYGEIIGCGSRIIPMSQDVLGKFDAGISISQTAERTNYRSVRKLIQRNTLRRERLHRVLHQLDFLPKHYNDSIDFEKKLGQFKTDKETKLNYFVNQHGKHEFLFKDSFNEMVKEFKEEQPELFYIKNNGKETKIPYDWTIYYLRKKALSKKISKEELSWLVLNFNQKRGYYQLRGEIDEEKEKNKRYEKLYVSEVVKTNNTIKKTGEYLYDIYFDNGWKYEKQTTKPQDWLHKHKEFIITTTTLKNGETKRTFKTVDSEKDWIAIKSKTEQDIKESNKTVGAFIYDTLLKNPTQKIRGSLVKTIERKFYREEFEKILKEQIKHRPEINVNTAIGKENYTKCVTELYPRNEAHANNILTNDFNYLFTKDILFYQRPLKSKKSEIANCQYEYRTYIKKKEKTGKEERVKQPLKATPKSHPLFQEFRLWQFIHNLKIYIRETTVGNKPLFDVDITDTFFTSENDWATLFEYLNNKKEIEQKHVLEYLVSKKIISKSEKTDYRWNYVEDKKYPGNETRVDFINRLKKVENLNVDEFLTSELEFKLWHIIYSVTDKNEYEKALENFAIRQNIDKDSFVNSFKKFPPFKSDYGAYSTKAIKKLLPLMRLGKFWDGSEIPKVVVEKITDIKTRLTSVNYDESLFKKDEKKILETIVDDITPKQLLKSFVKLKGKNHLAGLNTYQACYLVYERHSESSDITQWENPDDIDSFLNHFKQHSLRNPIVEQVVTETLRTVRDIWKYYGNGSPNYFNEIHIELGREMKNPADKRKQMSAKINENENTNQRIKGILQELMNDGVQDIKPYSPSQQEILKIYEEGISQNPNVDYSKVSEDEITKIKKSNNPTLKEIQRYKLWLEQKYISPYTGKPIPLSELFTPAYQIEHIIPQSRYFDNSLSNKIICESEVNEDKSNKTAYEYLKTNGGSIVHGHHLLSLKEYEDHCQHYFKKNRTKLKNLLSEEIPEGFINRQLNDSRYISKLIKGLLSNIVREENEQEATSKNIVPVTGSITSKLKQDWGLNDKWNEIIAPRFKRLNKMTNSNDFGYFDEKINTFRIQVPDAISRGFNKKRIDHRHHTLDALVIACCTKKHIQYLNSLNNEIIKHELKPSILIKNAQGDYTKHFMLPWNNFPIDCKNAIENTIVSFKQNLRVINKTSNKYQSYKDENGNLRLGKDGKPKKGLTKQTKGNNWAVRKAMHEDTFYGEIVDGENKGKLKIKTLLDTSFDVKKIEDKVLDKSIRTILINYLKQDKYKNLSKPHEEAFSPNGIIEMNKNIISLNNNIPHKPIKRVTLKHEKGKKFSIKTLLDKKTKFAKSATGTNVFFCIYKNINGKIKYHTPSFEEIIEIQKQEFEIKYKSKLNVPETLFDKKESFELLFYLQPNDLVYLPNDEELKNRQLIDFNNLNKKQIKRIYKFTDGSGTTANFIPYQVAKVIFNLNKKEQAKSSFKYPIQNEFGVGSPQSKNQKSIEGILIKERCIKLKIDRLGNISKA

SEQ ID NO: 431 - protein, 1629 aa, Francisella cf.
MNFKILPIAIDLGVKNTGVFSAFYQKGTSLERLDNKNGKVYELSKDSYTLLMNNRTARRHQRRGIDRKQLVKRLFKLIWTEQLNLEWDKDTQQAISFLFNRRGFSFITDGYSPEYLNIVPEQVKAILMDIFDDYNGEDDLDSYLKLATEQESKISEIYNKLMQKILEFKLRKLCTDIKDDKVSTKTLKEITSYEFELLADYLANYSEILKTQKFSYTDKQGNLKELSYYHHDKYNIQEFLKRHATINIQILDTLLTDDLDIWNFNFEKFDFDKNEEKLQNQEDKDHIQAHLHHFVFAVNKIKSEMASGGRHRSQYFQEITNVLDENNHQEGYLKNFCENLHNKKYSNLSVKNLVNLIGNLSNLELKPLRKYFNDKIHAKADHWDEQKFTETYCHWILGEWRVGVKDQDKKDGAKYSYKDLCNELKQKVTKAGLVDFLLELDPCRTIPPYLDNNNRKPPKCQSLILNPKFLDNQYPNWQQYLQELKKLQSIQNYLESFETDLKVLKSSKDQPYFVEYRSSNQQIASGQRDYKDLDARILQFIFDRVKASDELLLNEIYFQAKKLKQKASSELEKLESSKKLDEVIANSQLSQILKSQHTNGIFEQGTFLHLVCKYYKQRQRARDSRLYIMPEYRYDKKLHKYNNTGRFDDDNQLLTYCNHKPRQKRYQLLNDLAGVLQVSPNFLKDKIGSDDDLFISKWLVEHIRGFKKACEDSLKIQKDNRGLLNHKINIARNTKGKCEKEIFNLICKIEGSEDKKGNYKHGLAYELGVLLFGEPNEASKPEFDRKIKKFNSIYSFAQIQQIAFAERKGNANTCAVCSADNAHRMQQIKITEPVEDNKDKIILSAKAQRLPAITTRIVDGAVKKMATILAKNIVDDNWQNIKQVLSAKHQLHIPIITESNAFEFEPALADVKGKSLKDRRKKALERISPENIFKDKNNRIKEFAKGISAYSGANLTDGDFDGAKEELDHIIPRSHKKYGTLNDEANLICVTRGDNKNKGNRIFCLRDLANNYKLKQFETTDDLEIEKKIADTIWDANKKDFKFGNYRSFINLTPQEQKAFRHALFLADENPIKQAVIRAINNRNRTFVNGTQRYFAEVLANNIYLRAKKENLNTDKISFDYFGIPTIGNGRGIAEIRQLYEKVDSDIQAYAKGDKPQASYSHLIDAMLAFCIAADEHRNDGSIGLEIDKNYSLYPLDKNTGEVFTKDIFSQIKITDNEFSDKKLVRKKATEGFNTHRQMTRDGIYAENYLPILIHKELDEVRKGYTWKNSEEIKIFKGKKYDIQQLNNLLYCLKFVDKPISIDIQISTLEELRNILTTNNIAATAEYYYINLKTQKLHEYYIENYNTALGYKKYTKEMEFLRSLAYRSERVKIKSIDDVKQVLDKDSNFIIGKITLPFKKEWQRLYREWQNITIKDDYEFLKSFFNVKSITKLHKKVRKDFSLPISTNEGKFLVKRKTWDNNFIYQILNDSDSRVDGTKPFIPAFDISKNEIVEAIIDSFTSKNIFWLPKNIELQKVDNKNIFAIDTSKWFEVETPSDLRDIGVATIQYKIDNNSRPKVRVKLDYVIDDDSKINYFTNHSLLKSRYPDKVLEILKQSTIIEFESSGFNKTIKEMLGMTLAGIYNETSNN

SEQ ID NO: 432 - protein, 1646 aa, Francisella cf.
MNIKILPIAIDLGAKNTGVFSAFYQKGTSLESLDNKNGKVYELSKDSYTLLMNNRTARRHQRRGIDRKQLVKRLFKLIWTKQLNLEWNKDTQQTISFLLNRRGFSFITDGYSPEYLNIAPEAVKAILMSILDDYNGEDDLDSYLQSATENDSKIDELYNKLLQKALEFKLRKLCIDIKEDKVTTKTLKELSNTEFKLLANYLVDYDRILRTQKFSYTDKQGNLRELNYYHHDKYNIQEFLKRNIIINDVILEKLTDDLDIWNLNFDKFDFEKNLEKLENQEDKDYLQTHLHHFVFAVNKIKSEMASGGRHRSQYFQEITNVLVENNHQEGYLKNFCENLHNKKYSNLSVKNLVNLIGNLSNLELKPLRKYFNDKIHAKADYWDEQKFAETYSDWILGEWRVGAKDKDKKDGAKYSYKNLCDELKQKVGINQDGIINQTKSDFVDFLLELDPCRTIPPYLDNNNRKPPKCQSLILNPKFLDNKYPNWQQYLQELKKLQTVQNYLGNFEIDLKDLKSSKEQPYFVKYKSLNQQIASGQRDYKDLDARVLQFIFDRVKASDELLLNEIYSHAKKLKQNTSSELEKLELCKKLDEVIANSQLSQILKSQHVNGIFEQGTFLHLVCKYYKQRQRARDSRLYIMPEYRYDKKLDKYNNTGRFDDDNQLLTYCNHKPRQKRYQLLNDLAGVLQVSPNFLKDKIGSDDDLFISKWLVEHIRGFKKACEDSLKIQKDNRGLLNHKINIARNTKGKCEKEIFNLICKIEGSEDKKGNYKHGLAYELGVLLFGEPNQASKLEFDRKIKKFNSIYSFAQIQQIAFAERKGNANTCAVCSADNAHRMQQIKVAKPVEGNKDNIILSAKAQRLPAIPTRIVDGAVKKIATILARNIVDDNWDNIKQALSNNQQLHVPIITESNAFEFEPALADIKGKSLKDKRKKALERIDPENVFKDKNNRIKEFAKGISAYSDANLANGDFDGAKEELDHIIPRSHKKYGTLNDEANLICVTREDNQNRGNKAVFLYDLKPNYKLKQFNTTDDLEIEKKIADTIWDASKQDFKFGNYRSFINLTPQEQIAFRHALFLADKNPIKKAVIRAIDNRNRTFVNGTQRYFAEVLANNIYLRAKKENLATNRITFDYFGIETTNSNGRGIADVRKLYEKVDSDIQAYAKGDKPQDSYSHLIDAMIAFCVAADEHKNEGSIGLKMGNQYGLFPTPDKYDENTGEIISWHNDDIFRKIKVSDNQFSDKKLVRKKATEGFNTHRQMTRDGIYGESYLPILIHKNLNEVRKGYNWENSEEIKIFKGKKYDIQQLNNLVYCLKFVDKPISIDIQITTLEELRNILETNNISTTAEYYYINLKTQKLHEYYIENYNTALGYKKYTKEMEFLRSLAYRTERVKIKSIDDVSMILAKDSNFKAGKIELPFKTEWQRLYLEWQNTTIKDNHEFLKSYFSVKNATKQHKKVRKDFSLPISTNEGKLLVKRKTWDNNFIYQILNDSDSRADGTKPFIPAFDISKNEIVETIIKSFTSKNIFWLPKNIELQKVDNKSIFAIDTSRWFEVETPKDLIEIGVSTIQYKIDNNSRPKVRVKLDYVMDDDSKINYFMNHSLLKSRYPDKVLEILKQSTIIEFESSGFNKTIKEMLGMTLAGIYNETSNN

SEQ ID NO: 433 - protein, 1629 aa, Francisella novicida
MNFKILPIAIDLGVKNTGVFSAFYQKGTSLERLDNKNGKVYELSKDSYTLLMNNRTARRHQRRGIDRKQLVKKLFKLIWTEQLNLEWDKDTQQAISFLFNRRGFSFITDGYSPEYLNIVPEQVKAILMDIFDDYNGEDDLDSYLKLATEQESKISEIYNKLMQKILEFKLRKLCTDIKDDKVSTKTLKEITSYEFELLADYLANYSESLKTQKFSYTDKQGNLKELSYYHHDKYNIQEFLKRHATINDEILDTLLTDDLDIWNFNFEKFDFDKNEEKLQNQEDKDHTQAHLHHFVFAVNKIKSEMASGGRHRGQYFQEITNVLDENNHQEGYLKNFCENLHNKKYSNLSVKNLVNLIGNLSNLELKPLRKYFNDKIHAKADHWDEQKFTETYCHWILGEWRVGLKDQDKKEGAKYSYKDLCNELKQKVTNAGLIDFLLELDPCRTIPPYLDNNNRKPPKCQSLILNPKFLDNQYPNWQQYLQELKKLQIIQDYLESFETDLKVLKSSKDQPYFVEYKSSNQQIASGQRDYKDLDARILQFIFDRVKASDELLLNEIYFQAKKLKQKASSELEKLESSKKLDEVIANSQLSKILKSQHTNGIFEQGTFLHLVCKYYKQRQRARDSRLYIMPEYRYDKKLDKYNNTGRFDDDNQLLTYCNHKPRQKRYQLLNDLAGVLQVSPNFLKDKIGSDDDLFISKWLVEHIRGFKKACEDSLKIQKDNRGLLNHKINIARNTKGKCEKEIFNLICKIEGSEDKKGNYKHGLAYELGVLLFGEPNEASKPEFDRKIKKFNSIYSFAQIQQIAFAERKGNANTCAVCSADNAHRMQQIKITEPVEDNKDKIILSAKAQRLPAIPTRIVDGAVKKMATILAKNIVDDNWQNIKQVLSAKHQLHIPIITESNAFEFEPALADVKGKSLKDRRKKALERISPENIFKDKNNRIKEFAKGISAYSGANLTDGDFDGAKEELDHIIPRSHKKYGTLNDEANLICVTRDDNKNKGNRIFCLHDLANNYKLKQFETTDDLEIEKKIADTIWDASKKDFKFGNYRSFINLTPQEQKAFRHALFLADENPIKQAVIRAINNRNRTFVNGTQRYFAEVLANNIYLRAKKENLNTDKISFDYFGIPTIGNGRGIAEIRQLYEKVDSDIQVYAKGDKPQASYSHLIDAMLAFCIAADEHRNDGSIGLEIDKNYSLYPLDKNTGEVFTKDIFSQIKITDNEFSDKKLVRKKATEGFNTHRQMTRDGIYAENYLPILIHKELDEVRKGYTWKNSEEIKIFKGKKYDIQQLNNLLYCLKFVDKPISIDIQISTLEELRNILTTNNIAATAEYYYINLKTQKLHEYYIENYNTALGYKKYTKEMEFLRSLAYRSERVKIKSIDDVKQVLDKDSNFIIGKITLPFKKEWQRLYREWQNTTIKDDYEFLKSFFNVKSITKLHKKVRKDFSLPISTNEGKFLVKRKTWDNNFIYQILNDSDSRVDGTKPFIPAFDISKNEIVEAIIDSFTSKNIFWLPKNIELQKVDNKNIFAIDTSKWFEVETPSDLRDIGVATIQYKIDNNSRPKVRVKLDYVIDDDSKINYFTNHSLLKSRYPDKVLEILKQSTIIEFESSGFNKTIKEMLGMTLAGIYNETSNN

SEQ ID NO: 434 - protein, 1629 aa, Francisella novicida
MNFKILPIAIDLGVKNTGVFSAFYQKGTSLERLDNKNGKVYELSKDSYTLLMNNRTARRHQRRGIDRKQLVKRLFKLIWTEQLNLEWDKDTQQAISFLFNRRGFSFITDGYSPEYLNIVPEQVKAILMDIFDDYNGEDDLDSYLKLATEQESKISEIYNKLMQKILEFKLMKLCTDIKDDKVSTKTLKEITSYEFELLADYLANYSESLKTQKFSYTDKQGNLKELSYYHHDKYNIQEFLKRHATINDRILDTLLTDDLDIWNFNFEKFDFDKNEEKLQNQEDKDHIQAHLHHFVFAVNKIKSEMASGGRHRSQYFQEITNVLDENNHQEGYLKNFCENLHNKKYSNLSVKNLVNLIGNLSNLELKPLRKYFNDKIHAKADHWDEQKFTETYCHWILGEWRVGVKDQDKKDGAKYSYKDLCNELKQKVTKAGLVDFLLELDPCRTIPPYLDNNNRKPPKCQSLILNPKFLDNQYPNWQQYLQELKKLQSIQNYLDSFETDLKVLKSSKDQPYFVEYKSSNQQIASGQRDYKDLDARILQFIFDRVKASDELLLNEIYFQAKKLKQKASSELEKLESSKKLDEVIANSQLSQILKSQHTNGIFEQGTFLHLVCKYYKQRQRARDSRLYIMPEYRYDKKLHKYNNTGRFDDDNQLLTYCNHKPRQKRYQLLNDLAGVLQVSPNFLKDKIGSDDDLFISKWLVEHIRGFKKACEDSLKIQKDNRGLLNHKINIARNTKGKCEKEIFNLICKIEGSEDKKGNYKHGLAYELGVLLFGEPNEASKPEFDRKIKKFNSIYSFAQIQQIAFAERKGNANTCAVCSADNAHRMQQIKITEPVEDNKDKIILSAKAQRLPAIPTRIVDGAVKKMATILAKNIVDDNWQNIKQVLSAKHQLHIPIITESNAFEFEPALADVKGKSLKDRRKKALERISPENIFKDKNNRIKEFAKGISAYSGANLTDGDFDGAKEELDHIIPRSHKKYGTLNDEANLICVTRGDNKNKGNRIFCLRDLADNYKLKQFETTDDLEIEKKIADTIWDANKKDFKFGNYRSFINLTPQEQKAFRHALFLADENPIKQAVIRAINNRNRTFVNGTQRYFAEVLANNIYLRAKKENLNTDKISFDYFGIPTIGNGRGIAEIRQLYEKVDSDIQAYAKGDKPQASYSHLIDAMLAFCIAADEHRNDGSIGLEIDKNYSLYPLDKNTGEVFTKDIFSQIKITDNEFSDKKLVRKKAIEGFNTHRQMTRDGIYAENYLPILIHKELNEVRKGYTWKNSEEIKIFKGKKYDIQQLNNLVYCLKFVDKPISIDIQISTLEELRNILTTNNIAATAEYYYINLKTQKLHEYYIENYNTALGYKKYSKEMEFLRSLAYRSERVKIKSIDDVKQVLDKDSNFIIGKITLPFKKEWQRLYREWQNTTIKDDYEFLKSFFNVKSITKLHKKVRKDFSLPISTNEGKFLVKRKTWDNNFIYQILNDSDSRVDGTKPFIPAFDISKNEIVEAIIDSFTSKNIFWLPKNIELQKVDNKNIFAIDTSKWFEVETPSDLRDIGVATIQYKIDNNSRPKVRVKLDYVIDDDSKINYFTNHSLLKSRYPDKVLEILKQSTTIEFESSGFNKTIKEMLGMTLAGIYNETSNN

SEQ ID NO: 435 - protein, 244 aa, Francisella tularensis
ARKQNSEIYNKLMQKILEFKLRKLCTDIKDDKVSTKTLKEITSYEFELLADYLANYSESLKTQKFSYTDKQGNLKELSYYHHDKYNIQEFLKRHATINDEILDTLLTDDFDIWNFNFEKFDFDKNEEKLQNQEDKDHTQAYLHHFVFAVNKIKSEMASGGRHRSQYFQEITNVLDENNHQEGYLKNFCENLHNKKYSNLSVKNLVNLVGNLSNLELKPLRKYFNDKNLIIGMSKSLQKLIATGY

SEQ ID NO: 436 - protein, 501 aa, Francisella tularensis
MEIEKKIADTIWDASKQDFKFGNYRSFINLTPQEQKAFRYALFLADENSIKQAVIRAINNRNRTFVNGTQRYFAEVLANNIYLRAKKENLNTDKISFDYFGIPTIGNGRGIADIRQLYEKVDSDIQAYAKGDKPQASYSHLIDAMIAFCVAADEHRNDGSIGLEIDKNYSLYLLDKNTGEVFTKDIFSQIKITDNEFSDKKLVRKKATEGFNTHRQMTRDGIYAENYLPILIHKELDEVRKGYTWGNSEELKIHKGKKYNIQQLNNIVYCLKFIDKSISIDIQISTLEELRNILTTNNIAATAEYYYINLKNQKLHEYYIENYNTALDYKKYSKEMEFLRSLAYRSERVKIKSIDDVKQVLDKDSNFIIGKITLPFKKEWQRLYLEWQNTTIKDDYEFLKSFFNVKSITKLHKKVRKDFSLPISTNEGKFLVKRKTWDNNFIYQILNDSDSRVDGTKPFIPAFDISKNEIVEAIIDSFTSKNIFWLPKNIELQNVDKIFLL

SEQ ID NO: 437 - protein, 158 aa, Francisella tularensis
MIDFLLELDPCITIPPYLDNNNRKPPKCQSLILNPKFLDNQYPNWQQYLQELKKLQSIQDYLDSFETDLKDLKSSKDQPYFVEYKSSNQQMASGQRDYKDLDARILQFIFDRVKASDELLLNEIYFQAKKLKQKASSELEKLESSKKLDEVIANSQLS

SEQ ID NO: 438 - protein, 878 aa, Francisella tularensis
MLNDLAGVLQVSRNQLLSSVEEWFQQAQRVGEISKSQDEQIFEWLKSFKIASYCKAAVEMQKQYRGTLKNAIQTAIFRQSENINKNKNKNKNTGNQQQALSENSKDVKSLTADEKKLLKLIENIAKASQKIGESLGLNDKQIKKFNSIYNFAQIQQIAFAERKGNANTCAVYSADNAHRMQQIKITELVEDNKDNIILSAKAQRLPAIPTRIVDGAVKKMATILAKNIVDDNWQNIKQVLSAKHQLHIPIITESNAFEFEPALADVKGKSLKDRRKKALERISPENIFKDKNNRIKEFAKGISAYSGANLTDGDFDGAKEELDHIIPRSYKKYGTLNDEVNLICVTRDDNKNKGKRIFCLNDLANNYKLKQFETTDDLEIEKKIADTIWDASKQDFKFGNYRSFINLIPQEQKAFRYALFLADENSIKQAVIRAINNRNRTFVNGTQRYFAEVLANNIYLRAKKENLNTDKISFDYFGIPTIGNGRGIADIRQLYEKVDSDIQAYAKGDKPQASYSHLIDAMIAFCVAADEHRNDGSIGLEIDKNYSLYPLDKNTGEVFTKDIFSQIKITDNEFSDKKLVRKKATEGFNTHRQMTRDGIYAENYLPILIHKELDEVRKGYTWGNSEELKIHKGKKYNIQQLNNIVYCLKFIDKSISIDIQISTLEELRNILTTNNIAATAEYYYINLKNQKLHEYYIENYNTALDYKKYSKEMEFLRSLAYRSERVKIKSIDDVKQVLDKDSNFIIGKITLPFKKEWQRLYLEWQNTTIKDDYEFLKSFFNVKSINKLHKKVRKDFSLPISTNEGKFLVKRKTWDNNFIYQILNDSDSRVDGTKPFIPAFDISKNEIVEAIIDSFTSKNIFWLPKNIELQKVDKIFLL

SEQ ID NO: 439 - protein, 292 aa, Francisella tularensis
MLNDLAGVLQVSRNQLLSSVEEWFQQAQRVGEISKSQDEQIFEWLKSFKIASYCKAAVEMQKQYRGTLKNAIQTAIFRQSENINKNKNKNTGNQQQALSENSKDVKSLTADEKKLLKLIENIAKASQKIGESLGLNDKQIKKFNSIYNFAQIQQIAFAERKGNANTCAVYSADNAHRMQQIKITELVEDNKDNIILSAKAQRLPAIPTRIVDGAVKKMVTILAKNIVDDNWQNIKQVLSAKHQLHIPIITESNAFEFEPALADVKGKSLKDRRKKALERISPENIFKDKNIC

SEQ ID NO: 440 - protein, 53 aa, Francisella tularensis
MNHSLLKSRYPDKVLEILKQSTIIEFESSGFNKTIKEMLGMTLAGIYNETSNN

SEQ ID NO: 441 - protein, 393 aa, Francisella tularensis
MNVKILPIAIDLDVKNTGVFSAFYQKGTSLEKLDNKNGKVYELSKDSYTLLMNNRTAQRHQRRGIDRKQLVKRLFKLVWTEQLNLEWDKDTQQAISFLFNRRGFSFITDGYSTEYLNIVPEQVKAILMDIFDDYNGEDDLDSYLKLATEQESKISEIYNKLMQKILEFKLRKLCTDIKDDKVSTKTLKEITSYEFELLADYLANYSESLKTQKFSYTDKQGNLKELSYYHHDKYNIQEFLKRHATINDEILDTLLTDDFDIWNFNFEKFDFDKNEEKLQNQEDKDHTQAYLHHFVFAVNKIKSEMASGGRHRSQYFQEITNVLDENNHQEGYLKNFCENLHNKKYSNLSVKNLVNLVGNLSNLELKPLRKYFNDKNLIIGMSKSLQKLIATGY

SEQ ID NO: 442 - protein, 1629 aa, Francisella tularensis
MNVKILPIAIDLGVKNTGVFSAFYQKGTSLERLDNKNGKVYELSKDSYTLLMNNRTARRHQRRGIDRKQLVKRLFKLIWTEQLNLEWDKDTQQAISFLFNRRGFSFITDGYSPEYLNIVPEQVKAILMDIFDDYNGEDDLDSYLKLATEQESKISEIYNKLMQKILEFKLRKLCTDIKDDKVSTKTLKEITSYEFELLADYLANYSEILKTQKFSYTDKQGNLKELSYYHHDKYNIQEFLKRHATINDEILDTLLTDDLDIWNFNFEKFDFDKNEEKLQNQEDKDHTQAHLHHFVFAVNKIKSEMASGGRHRGQYFQEITNVLDENNHQEGYLKNFCENLHNKKYSNLSVKNLVNLIGNLSNLELKPLRKYFNDKIHAKADHWDEQKFTETYCHWILGEWRVGVKDQDKKDGAKYSYKDLCNELKQKVTKAGLVDFLLELDPCRTIPPYLDNNNRKPPKCQSLILNPKFLDNQYPNWQQYLQELKKLQSIQNYLESFETDLKVLKSSKDQPYFVEYKSSNQQIASGQRDYKDLDARILQFIFDRVKASDELLLNEIYFQAKKLKQKASSELEKLESSKKLDEVIANSQLSQILKSQHTNGIFEQGTFLHLVCKYYKQRQRARDSRLYIMPEYRYDKKLDKYNNTGRFDDDNQLLTYCNHKPRQKRYQLLNDLAGVLQVSPNFLKDKIGSDDDLFISKWLVEHIRGFKKACEDSLKIQKDNRGLLNHKINIARNTKGKCEKEIFNLICKIEGSEDKKGNYKHGLAYELGVLLFGEPNEASKPEFDRKIKKFNSIYSFAQIQQIAFAERKGNANTCAVCSADNAHRMQQIKITEPVEDNKDKIILSAKAQRLPAIPTRIVDGAVKKMATILAKNIVDDNWQNIKQVLSAKHQLHIPIITESNAFEFEPALADVKGKSIKDRRKKALERISPENIFKDKNNRIKEFAKGISAYSGDNLASGDFDGAKEELDHIIPRSHKKYGTLNDEANLICVTRDDNKNKGNRIFCLHDLANNYKLKQFETTDDLEIEKKIADTIWDASKKDFKFGNYRSFINLTPQEQKAFRHALFLADENPIKQAVIRAINNRNRTFVNGTQRYFAEVLANNIYLRAKKENLNTDKISFDYFGIPTIGNGRGIVEIRQLYEKVDSDIQAYAKGDKPQASYSHLIDAMLAFCIAADEHRNDGSIGLEIDKNYSLYPLDKNTGEVFTKDIFSQIKITNNEFSDKKLVRKKATEGFNTHRQMTRDGIYAENYLPILIHKELDEVRKGYTWGNSEELKIHKGKKYDIQQLNNLVYCLKFIDKSISIDIQISTLEELRNILTTNNIATTAEYYYINLKTQKLHEYYIENYNTALGYKKYTKEMEFLRSLAYRSERVKIKSIDDVKQVLDKDSNFIIGKITLPFKKEWQRLYREWQNTTIKDDYEFLKSFFNVKSITKLHKKVRKDFSLPISTNEGKFLVKRKTWDNNFIYQILNDSDSRVDGTKPFIPAFDISKNEIVEAIIDSFTSKNIFWLPKNIELQKVDNKNIFAIDTSKWFEVETPSDLRDIGVATIQYKIDNNSRPKVRVKLDYVIDDDSKINYFTNHSLLKSRYPDKVLEILKQSTIIEFESSGFNKTIKEMLGMTLAGIYNETSNN

SEQ ID NO: 443 - protein, 285 aa, Francisella tularensis
MTRDGIYAENYLPILIHKELDEVRKGYTWGNSEELKIHKGKKYNIQQLNNIVYCLKFIDKSISIDIQISTLEELRNILTTNNIAATAEYYYINLKNQKLHEYYIENYNTALDYKKYSKEMEFLRSLAYRSERVKIKSIDDVKQVLDKDSNFIIGKITLPFKKEWQRLYLEWQNTTIKDDYEFLKSFFNVKSITKLHKKVRKDFSLPISTNEGKFLVKRKTWDNNFIYQILNDSDSRVDGTKPFIPAFDISKNEIVEAIIDSFTSKNIFWLPKNIELQKVDKIFLL

SEQ ID NO: 444 - protein, 1323 aa, Fructobacillus fructosus
MVYDVGLDIGTGSVGWVALDENGKLARAKGKNLVGVRLFDTAQTAADRRGFRTTRRRLSRRKWRLRLLDELFSAEINEIDSSFFQRLKYSYVHPKDEENKAHYYGGYLFPTEEETKKFHRSYPTIYHLRQELMAQPNKRFDIREIYLAIHHLVKYRGHFLSSQEKITIGSTYNPEDLANAIEVYADEKGLSWELNNPEQLTEIISGEAGYGLNKSMKADEALKLFEFDNNQDKVAIKTLLAGLTGNQIDFAKLFGKDISDKDEAKLWKLKLDDEALEEKSQTILSQLTDEEIELFHAVVQAYDGFVLIGLLNGADSVSAAMVQLYDQHREDRKLLKSLAQKAGLKHKRFSEIYEQLALATDEATIKNGISTARELVEESNLSKEVKEDTLRRLDENEFLPKQRTKANSVIPHQLHLAELQKILQNQGQYYPFLLDTFEKEDGQDNKIEELLRFRIPYYVGPLVTKKDVEHAGGDADNHWVERNEGFEKSRVTPWNFDKVFNRDKAARDFIERLTGNDTYLIGEKTLPQNSLRYQLFTVLNELNNVRVNGKKFDSKTKADLINDLFKARKTVSLSALKDYLKAQGKGDVTITGLADESKFNSSLSSYNDLKKTFDAEYLENEDNQETLEKIIEIQTVFEDSKIASRELSKLPLDDDQVKKLSQTHYTGWGRLSEKLLDSKIIDERGQKVSILDKLKSTSQNFMSIINNDKYGVQAWITEQNTGSSKLTFDEKVNELTTSPANKRGIKQSFAVLNDIKKAMKEEPRRVYLEFAREDQTSVRSVPRYNQLKEKYQSKSLSEEAKVLKKTLDGNKNKMSDDRYFLYFQQQGKDMYTGRPINFERLSQDYDIDHIIPQAFTKDDSLDNRVLVSRPENARKSDSFAYTDEVQKQDGSLWTSLLKSGFINRKKYERLTKAGKYLDGQKTGFIARQLVETRQIIKNVASLIEGEYENSKAVAIRSEITADMRLLVGIKKHREINSFHHAFDALLITAAGQYMQNRYPDRDSTNVYNEFDRYTNDYLKNLRQLSSRDEVRRLKSFGFVVGTMRKGNEDWSEENTSYLRKVMMFKNILTTKKTEKDRGPLNKETIFSPKSGKKLIPLNSKRSDTALYGGYSNVYSAYMTLVRANGKNLLIKIPISIANQIEVGNLKINDYIVNNPAIKKFEKILISKLPLGQLVNEDGNLIYLASNEYRHNAKQLWLSTTDADKIASISENSSDEELLEAYDILTSENVKNRFPFFKKDIDKLSQVRDEFLDSDKRIAVIQTILRGLQIDAAYQAPVKIISKKVSDWHKLQQSGGIKLSDNSEMIYQSATGIFETRVKISDLL

SEQ ID NO: 445 - protein, 1367 aa, Fusobacterium sp.
MKKQKFSDYYLGFDIGTNSVGWCVTDLDYNVLRFNKKDMWGSRLFDEAKTAAERRVQRNSRRRLKRRKWRLNLLEEIFSDEIMKIDSNFFRRLKESSLWLEDKNSKEKFTLFNDDNYKDYDFYKQYPTIFHLRDELIKNPEKKDIRLIYLALHSIFKSRGHFLFEGQNLKEIKNFETLYNNLISFLEDNGINKSIDKDNIKKLEKIICDSGKGLKDKEKEFKEIFNSDKQLVAIFKLSVGSSVSLNDLFDTDEYKKEEVEKEKISFREQIYEDDKPIYYSILGEKIELLDIAKSFYDFMVLNNILSDSNYISEAKVKLYEEHKKDLKNLKYIIRKYNKENYDKLFKDKNENNYPAYIGLNKEKGKKEVVEKSGLKIDDLIKVIKGYLPKPERIEEKDKTIFNEILNKIELKTILPKQRISDNGTLPYQIHEVELEKILENQSKYYDFLNYEENGVSTKDKLLKTFKFRIPYYVGPLNSYHKDKGGNSWIVRKEEGKILPWNFEQKVDIEKSAEEFIKRMTNKCTYLNGEDVIPKDSFLYSEYIILNELNKVQVNDEFLNEENKRKIIDELFKENKKVSEKKFKEYLLVNQIANRTVELKGIKDSFNSNYVSYIKFKDIFGEKLNLDIYKEISEKSILWKCLYGDDKKIFEKKIKNEYGDILNKDEIKKINSFKFNTWGRLSEKLLTGIEFINLETGECYSSVMEALRRTNYNLMELLSSKFTLQESIDNGNKEMNEVSYRDLIEESYVSPSLKRAILQTLKIYEEIKKITGRVPKKVFIEMARGGDETMKNKKIPARQEQLKKLYDSCGNDIANFSIDIKKMKSSLSSYDNNSLRQKKLYLYYLQFGKCMYTGREIDLDRLLQNNDTYDIDHIYPRSKVIKDDSFDNLVLVLKNENAEKSNEYPVKKEIQEKMKSFWRFLKEKNFISDEKYKRLTGKDDFELRGFMARQLVNVRQTTKEVGKILQQIEPEIKIVYSKAEIASSFREMFDFIKVRELNDTHHAKDAYLNIVAGNVYNTKFTEKPYRYLQEIKENYDVKKIYNYDIKNAWDKENSLEIVKKNMKKNTVNITRFIKEEKGQLFDLNPIKKGETSNEIISIKPKLYNGKEEKLNEKYGYYKSLNPAYFLYVEHKEKNKRIKSFERVNLVDVNNIKDEKSLVKYLIENKKLVEPRLIKKVYKRQVILINDYPYSIVALDSNKLMDFENLKPLFLENKYEKILKNVIKFLEDNQGKSEENYKFIYLKKKDRYEKNETLESVKDRYNLEFNEMYDKFLEKLDSKDYKNYINNKKYKNLLDVKEKFIKLNLFDKAFTLKSFLDLFNRKTMADFSKVGLTKYLGKIQKISSNVLSKNELYLLEESVTGLFVKKIKL

SEQ ID NO: 446 - protein, 1367 aa, Fusobacterium sp.
MKKQKFSDYYLGFDIGTNSVGWCVTDLDYNVLRFNKKDMWGSRLFDEAKTAAERRVQRNSRRRLKRRKWRLNLLEEIFSDEIMKIDSNFFRRLKESSLWLEDKNSKEKFTLFNDDNYKDYDFYKQYPTIFHLRDELIKNPEKKDIRLIYLALHSIFKSRGHFLFEGQNLKEIKNFETLYNNLISFLEDNGINKSIDKDNIKKLEKIICDSGKGLKDKEKEFKEIFNSDKQLVAIFKLSVGSSVSLNDLFDTDEYKKEEVEKEKISFREQIYEDDKPIYYSILGEKIELLDIAKSFYDFMVLNNILSDSNYISEAKVKLYEEHKKDLKNLKYIIRKYNKENYDKLFKDKNENNYPAYIGLNKEKGKKEVVEKSGLKIDDLIKVIKGYLPKPERIEEKDKIIFNEILNKIELKTILPKQRISDNGTLPYQIHEVELEKILENQSKYYDFLNYEENGVSTKDKLLKTFKFRIPYYVGPLNSYHKDKGGNSWIVRKEEGKILPWNFEQKVDIEKSAEEFIKRMTNKCTYLNGEDVIPKDSFLYSEYIILNELNKVQVNDEFLNEENKRKIIDELFKENKKVSEKKFKEYLLVNQIANRTVELKGIKDSFNSNYVSYIKFKDIFGEKLNLDIYKEISEKSILWKCLYGDDKKIFEKKIKNEYGDILNKDEIKKINSFKFNTWGRLSEKLLTGIEFINLETGECYSSVMEALRRTNYNLMELLSSKFTLQESIDNGNKEMNEVSYRDLIEESYVSPSLKRAILQTLKIYEEIKKITGRVPKKVFIEMARGGDETMKNKKIPARQEQLKKLYDSCGNDIANFSIDIKKMKSSLSSYDNNSLRQKKLYLYYLQFGKCMYTGREIDLDRLLQNNDTYDIDHIYPRSKVIKDDSFDNLVLVLKNENAEKSNEYPVKKEIQEKMKSFWRFLKEKNFISDEKYKRLTGKDDFELRGFMARQLVNVRQTTKEVGKILQQIEPEIKIVYSKAEIASSFREMFDFIKVRELNDTHHAKDAYLNIVAGNVYNTKFTEKPYRYLQEIKENYDVKKIYNYDIKNAWDKENSLEIVKKNMKKNTVNITRFIKEEKGQLFDLNPIKKGETSNEIISIKPKLYNGKEEKLNEKYGYYKSLNPAYFLYVEHKEKNKRIKSFERVNLVDVNNIKDEKSLVKYLIENKKLVEPRLIKKVYKRQVILINDYPYSIVALDSNKLMDFENLKPLFLENKYEKILKNVIKFLEDNQGKSEENYKFIYLKKKDRYEKNETLESVKDRYNLEFNEMYDKFLEKLDSKDYKNYINNKKYKNLLDVKEKFIKLNLFDKAFTLKSFLDLFNRKTMADFSKVGLTKYLGKIQKISSNVLSKNELYLLEESVTGLFVKKIKL

SEQ ID NO: 447 - protein, 1367 aa, Fusobacterium sp.
MKKQQFSDYYLGFDIGTNSVGWCVTDFNYNVLRFNKKDMWGSRLFDEAKTAAERRVQRNSRRRLKRRKWRLNLLEEIFSDEILKIDSNFFRRLKESSLWLEDKSSKEKFTLFNDDNYKDYDFYKQYPTIFHLRNELIKNPEKKDIRLVYLALHSIFKSRGHFLFEGQNLKDIKNFETLYNNLMAFLEDNDIYKNIDSSYIGNLENIICDSKKGLKDKEKEFKEIFNSDKQLVGFFKLSVGSSVSLNDLFDTDEYKKGEVEKEKISFREQIYEDDKPIYYSILGEKIEFLDIAKSFYDFMVLNNILADSQYISEAKVKLYDEHKRDLKNLKYIIRKYNKENYDKLFKDKNESNYSAYIGLNKEKGKKEVIEKSRLKIDDFAKIIKGYLPKAEKIDEKDRSIFNEILDKIELKTILPKQRISDNGTLPYQIHEAELEKILENQAKYYDFLNHEENGISTKDKLLMTFKFRIPYYVGPLNSYHKNKGGNSWIVRKEEGKILPWNFEQKVDIEKSAEEFIKRMTNKCTYLNGEDVIPKDSFLYSEYIILNELNKVQVNDEFLNKEIKKKIIEDLFKKSKKISEKNFREYLLVNQITNKTVELKGVKDAFNSNYVSYIKFKDIFGDKLNLDIYKEISEKSILWKCLYGDDKKIFEKKIKSVYGDILTKDEIKKINSFKFNTWGRLSEKLLTEIEFIDLETGECYSSVMDALRRTNYNLMELLSSKFTLQENIDNENKEVSEFSYRDLVEESYVSPSLKRAILQTLKIYEEIRKITGRIPKKVFIEMARGGDETMKNKKIPARQEQLKKLYDSCGKDISNFSIDIKEMKNSLNSYDNNSLRQKKLYLYYLQFGKCMYTGKEIDLNRLLQNNDTYDIDHIYPRSKVIKDDSFDNLVLVLKNENAEKSNEYPLKKEIQEKMKSFWKFLKEKNFISDEKYKRLTGKDEFELRGFMARQLVNVRQTTKEAGKILQQIEPEIKIVYSKAEIASSFREMFDFIKVRELNDTHHAKDAYLNIVAGNVYNTKFTEKPYRYLQEIKENYDVKKIYNYDIKNAWDKEKSLEIVKKNMEKNTVNITRFIKEEKGQLFDLNPIRKGETSNEIIAIKPKFYEGSTEKLNEKYGYYKSLNPAYFIYVEHKEKNKIIRSFERVNLVDVNKIKDEKSLIKYLIENKGLIEPKVIKKVYKRQVILINNFPYSIVALDSNKLMDFENLKPLFLERKYEKILKNAIKFLEDNQGKTEEYYKFLYLKKKDRNEKNETIDSVKERYNIEFNEMYDKFLEKLDSKDYKNYINNKKYSELVNVKEKFIKLNLFDKAFTLKSFLDLFNRKTMADFSKVGLTKYLGKIQKISSNVLSKNELHLLEESVTGLFVKKIKL

SEQ ID NO: 448 - protein, 1391 aa, Galbibacter sp.
MKTILGLDLGTNSIGWALVKEAENENEVSDIIKLGVRVNPLTVDELTNFEGGKAYSNNAERTLKRGARRNLQRYKLRRENLIEILLKNGLINKDTALTEVGKETTHQTLKLRSKSANEKVSLEDLAKILLSINKKRGYKSSRKVNAEDDGVAIDGMEVAKLLYDENMTPGEYVLRLLESGKKHLPDFYRSDLQEEFNLVWKKQSEFYPLILTKELFFELHGKNKSQTWAICKEPLGIVGVKLKGSAKEQKFARYRLRKEALTQQIELEHLAIVLQDINNDSNKSSGYLGAISDRSKELFFNKETVGQYQYKQLQKDPNTSLKNQVFYRQDYLDEFEVIWRNQAKFYPQLTNELKQEIRDVVIFYQRKLKSQKNLISFCQFESTQQNYVEKETGKTKIRTIGRRVIPRSSPLFQEFKIWQSLNNLKFVNSESNQIIQFIELEDDVKKVVFDELNLRGDLKPNQVLKILSKYMKIGKLTQWKCNLEEIEGNRTNSALYNVFQMIAEEEGYGFNWGKKSALEIKSELKAIFSSIGINDSILDFDFSKKLDQQLSYQLWHLLYSAEEGNSKITEEDKFTYGNTGVALKKKLHLKFGFKPEYSTLISNLRFTSDYGNLSSKAISKILPFLRDGSDYSKACQYAGYNHSNSLSADELDNRELKPKLELLKKNSLRNPVVEKILNQMVNVVNQVIDNYGKPDEVRIELARELKKSAKERSQMTKNISDATRRNAEIKKYLSKEFGIPNPTKGDVIRYRLWEELASNGYKDLFRDKYIPKEKLFSNEIDIEHIIPKALLFDDSFSNKTLAFKVDNLKKADRTAFDFMSTDFSKDVDSYIGRIETLHKDGKISSSKYKKLMIPKSKLVDGFIERDLRNTQYIAKQARKMLLEVFKTVVPTTGKITDKLREDWDLINVMKELNFPKYKALGLTKKIERFDVGSEKIKSINVIEGWSKRNDHRHHAMDALAVAFTTHNHIQYLNYLNARKDIHHEMHGTIKSIENQIIGKDVMGKRRFIPPISDLRMKAKLQIESILISFKNKNKVVTWSVNKTKLKGKDNYNKRRQLTPRGQLHKETVYGKIKLIDPKPLKLNNKFTLVRASMIVDKVHREIVLQHLSKYDNNSEVAFDSKTIKIDPILIEGIGLKEVVCYEDVFKIRKKISGDNFKNEKHLEKVIDEKVKQILKDRVIKFQGNFKEAFSNLEENPIWLNKSKGIAVKSVAIKGVNNAESLHEGKDHFGDQILDKNKKQIPVDFVSTGNNHHVGIYEDKDGNLQERVVSFFEAVTRVNEGLPIIDKTYNSDIGWKFKFTMKQNEMFVFPSDDFDPNEFDLTDGKNAAKISPNLYRVQKIATKNYMFRHHLETVVTNDLEFTYKSIRSTGWLRNLVKVRINHLGEIVYVGEY

SEQ ID NO: 449 - protein, 1186 aa, Gardnerella vaginalis
MEGNISYAIGIDVGLNSVGLAAIRLDDYGEPIRILKAMSVIHDAGIDPNGAKESDTRKAISGVARRVRRLYRQRRRRLQKLDFLLQSLGWPVVENKDLDFSDSFIPWIFRAKLADEYIADEEQRKQMLSVAIRHIARHRGWRNPYQSIKSMMQETEYSEFYNELLKNIEKLAPGVGCEGSTPAQLVRDYLLSQQGKASRRLRITTGGRRKNHPHSLDPVLPRKLMQSDNMLEILNIFNVQHIDDKYVREQIINAVFYAESPRGSAENRVGKDAITGKGKRALKASLAFQKYRIISTISNLRIRENSKERCLTIEEKQNVYKLLTTSIDKSSKRKSAEAPLYTWIDVADCLGIERYKLRGVGSQIGDGESVGNRPPMLNSELAILYANNKSLGQSLITWWLASNRTQEDKEALIEILSNTVDIEAIHDNPEYQDKYGSAIAFIDSMNETEIAALENISLPDGRAAYSLETLDELNKQMLETDDDLFEARKKLFNLPNNWRPAEAPIAEPTGNPSVDRVLKIVHRFLISAKNRWGNPERINIEHVRSGFQSKKMANSYKELLDKRTEGKENLKAMMRNSLHLGTSDSISDADIRRYEAVQRQNGQCLYCGSEITYHTCELDHIVPRKGPGSTNTRENLVATCSSCNAQKCNTPFATWCEQSTYCKNHDISADSAINRVRAFIFPPNSYDKRGANQFKKEVIARLKQKVGDEAFDNRSIESVAWMANELHRRIDWYYNSQNYQTNNGISDISNKAQTNVGVYAGSLTAIARRMSGIDGKLEFFDGRRKTRFDRRHHAVDASVIAMMTPGIAQILAIKCNLRETQLLQGNKVVPGGIDWKEYPTANDQGYQQYANWSVRMNALLKLLNEEMRADRIAVVNSIRLRYSNSSVHQYEVNALLKLHVGDEIDSETIRRSSTPALYCALTRNPDYDVNNGFPENPGRTILLHNKKLNADDSITFFKAQAVQLFVREGSAKIGNSIHHLRIYEYFEKLKSGKIKKSYGMIRVFQNDLHRHIHEDLFSCDLPEQSISMRYADTKVAHAVQTGNANYLGYLVPGDEIIVDFSHITLSENIGKFVEFLNKIGADCTAYRHWVVVGTDTEKVLILKPSMISSEGIDKLYSNCERNNFDYSSYEKSINEILAGKGWRVSVNVLAQYKAATIRRNALGEVRWASRSHLPISWSWDTGENRE

SEQ ID NO: 450 - protein, 1186 aa, Gardnerella vaginalis
MEGNISYAIGIDVGLNSVGLAAIRLDNNGEPIRILKAMSVIHDAGIDPNGAKESDTRKAISGVARRVRRLYRQRRRRLQKLDFLLHSLGFPVVENKDLDFSDSFIPWIFRAKLADEYIADEKQRKQMLSVAIRHIARHRGWRNPYQSIKSMTQETEYSEFYNELLKNIEKFAPGVGCEGSTPAQLVRDYLLLQQGKASRRLRITTDEKRKNHPNSLNPILPRKLMQSDNMLEILNIFNVQHIDDKYVREQIINAVFYAKSPRGSAENRVGKDAITGKGKRALKASLAFQKYRIISTISNLRIRENSKERCLTIEEKQSVYKLLTTSTDESSKEKSAEAPLYTWIDVADCLGIERYKLRGVGSQIGDGESVGNRPPMLNSELAIIYANNKSLGKSLLTWWLDANRTQEDKEALIEILSNTVDIEAIHDNPEYQDKYGSAIAFIDSMDETEIAALENISLPDGRAAYSLETLDKLNKQMLETDDDLFEARKKLFNLPNNWRPSEAPIAEPTGNPSVDRVLKIVHRFLISAKNRWGNPERINIEHVRSGFKSKKMANSYKELLDKRTKGKENLKAMMRNSLHLGMSDSISDADIRRYEAVQRQNGQCLYCGSEITYHTCELDHIVPRKGPGSTNTRENLVATCSLCNAQKCNTPFSTWCEQSTYCKNHDISVDSAINRVRAFIFPPNSYDKRGANQFKKEVIARLKQKVGDEAFDNRSIESVAWMANELHRRIDWYYNSQNYQTNNGISDITNKAQTNVGVYAGSLTAIARRMSGIDGKLEFFDGRRKTRFDRRHHAVDASVIAMMTPGIAQILAIKCNLRETQLLQGNKVVPGGIDWKEYPTANDQGYQQYANWSVRMNALLKLLNEEMRADRIAVVNSIRLRYNNSSVHQYKVNALLKLHVGDEIDSGTIRRSSTPALYCALTRNPDYDVNNGLPENPNRAILLHDKKLNADDSITFFKAQAVQLFVREGSAEIGSSTHHLRIYEYFKKLKSGKIKKSYGMIRVFQNDLHRHIHEDLFSCDLPEQSISMRYADTEVAHAVQTGNSNYLGYLVPGDEIIVDFSHVKLSGNIGTFVEFLNKIGANCAAYNHWVVVGTDTEKVLILKPSMISSEGIDKLYSNCKRNNFDYSSYEKSINEILVGKGWRVSVNVLAKYNAETIRRNALGEVRWTSRSHLPISWSWNTGENRE

SEQ ID NO: 451 - protein, 1258 aa, Gemella haemolysans
MTEENPDIRKVFLAIHHILKNRGHFLLQGQSFKEGNLNNLIKELLNLDILHISIEITEENINKITEIALEKKTLTDKVNDLKKIYPKEKQLLEAFRLIFGGKTSLDKLFAIDEYKELDASVKSVSFKEKIYEEVRHDYEQVLSNYIELLDLAKLVYDSIILSDIKKEGKTLSESKVELYHKHREDLTKLKTLVKNDSKLSEDKKVELYSAIFKEDKDKGTNYVNYIRKSEEGKGCNYEDFKKFLVKELAKLEESSAKEEILRDLELELFLPLQRTKDNSVVPYQIHKEELVKILDNAAKYHKFLNEKDDSGYSIIEKVIQLLEFRIPYYVGPLNSSKKAKVDGFAWSVRNKGYENTPVTPWNYEKVIDESASAEKFITNLTNKCTYLKGEDVLPKSSLLYSEFALLNELNALKYDGNRISLEARNVIIEKLFKEQGKKVTKTSIKNLLKAEGYIDGKGEITGIDITVKNDLKSYRDFKKILGDKFNTEHVENIILWITLYGESRKLIKAKIEAVYGDIYSKEEIAKMSRLVYKDWGRFSRKLLTELVSKKLYNEETGECLNIIGAMRQNNILFMELLADRFDYSQQIIDYNKELQKEVTEITPEILDDLYVSPSVKRSIWQTVRIVEELKKIIGCAPAKIFVETTRSNQDKKKPTDSRKKQLELFYKAVKKDVKDLEKEIGSLNFDKLNERLSSVEPSKLKAKKLYLYYTQLGRCMYSGETIDITQLNTTAYDIDHIYPQSKVKDDSFTNTVLVKREYNAAKTDRYPLGSDIQTPSNRRFWKFLKEKGLITDEKYNRLVRTEEFSDEELTGFIARQLVETSQSVKAVAGILGELNPKTSICYSKAENVSSFRQNFGKIKEGNRKSDNTEQLIKVREINDYHHAKDAYLNVVVGNVYDTKFTRNVFNFIKDKKDGRKYSLNNVFYENVSNSNNVAWELNKTVHQVEKVMNNNNILVTRRTSEQKGGLFDATVYKAKVAAKAKEGVYYPLKTSDPVVNDVTKYGGFTKVKIAYYSIFEYTLVNKKGEEKITRIIPIPIYVSQNIKDDSTLLEFGKTQINIKSGEEVKDFKLKYRKLCIGDLVKINNFFNFIGGKTNDSFVYDGAVQVTLDTESERYIKTLSKYQNWKKENKDGELWESITKEKNTELYNLLVEKMNSGIFIKKKPNKFNELNSEEIRNNFSSISLEEQAKVLLEVLNLLTNKKSIFDLKSINITAARGKISFNLSNLSQFSIIEQSVAGFYEKEITIIGDKENDMENNNC

SEQ ID NO: 452 - protein, 1054 aa, Haemophilus parainfluenzae
MENKNLNYILGLDLGIASVGWAVVEIDEKENPLRLIDVGVRTFERAEVPKTGESLALSRRLARSARRLTQRRVARLKKAKRLLKSENILLSTDERLPHQVWQLRVEGLDHKLERQEWAAVLLHLIKHRGYLSQRKNESKSENKELGALLSGVDNNHKLLQQATYRSPAELAVKKFEVEEGHIRNQQGAYTHTFSRLDLLAEMELLFSRQQHFGNPFASEKLLENLTALLMWQKPALSGEAILKMLGKCTFEDEYKAAKNTYSAERFVWITKLNNLRIQENGLERALNDNERLALMEQPYDKNRLFYSQVRSILKLSDEAIFKGLRYSGEDKKAIETKAVLMEMKAYHQIRKVLEGNNLKAEWAELKANPTLLDEIGTAFSLYKTDEDISAYLAGKLSQPVLNALLENLSFDKFIQLSLKALYKLLPLMQQGLRYDEACREIYGDHYGKKTEENHHFLPQIPADEIRNPVVLRTLTQARKVINGVVRLYGSPARIHIETGREVGKSYKDRRELEKRQEENRKQRENAIKEFKEYFPHFAGEPKAKDILKMRLYKQQNAKCLYSGKPIELHRLLEKGYVEVDHALPFSRTWDDSFNNKVLVLANENQNKGNLTPFEWLDGKHNSERWRAFKALVETSAFPYAKKQRILSQKLDEKGFIERNLNDTRYVARFLCNFIADNMHLTGEGKRKVFASNGQITALLRSRWGLAKSREDNDRHHALDAVVVACSTVAMQQKITRFVRFEAGDVFTGERIDRETGEIIPLHFPTPWQFFKQEVEIRIFSDNPKLELENRLPDRPQANHEFVQPLFVSRMPTRKMTGQGHMETVKSAKRLNEGISVIKMPLTKLKLKDLELMVNREREKDLYDTLKARLEAFNDDPAKAFAEPFIKKGGAIVKSVRVEQIQKSGVLVREGNGVADNASMVRVDVFTKGGKYFLVPIYTWQVAKGILPNKAATQYKDEEDWEVMDNSATFKFSLHPNDLVKLVTKKKTILGYFNGLNRATGNIDIKEHDLDKSKGKQGIFEGVGIKLALSFEKYQVDELGKNIRLCKPSKRQPVR

SEQ ID NO: 453 - protein, 1052 aa, Haemophilus parainfluenzae]
MKNTSLNYVLGLDLGISSVGWAVVEIDEKENPLSLIDVGVRTFERAETQKGESLALARRLARSARRLTQRRVARLKKAKRLLKSENILLSTDECLPHQVWQLRVEGLERKLERQEWAAVLLHLIKHRGYLSQRKNESKSENKELGALLSGVANNHKLLQQTTYRTPAELAVKKFEVEEGHIRNQQGSYTHTFSRLDLLSEMELLFSRQQHFGNPFTSEKLLENLTALLMWQKPALSGDAILKMLGKCTFENEYKAAKHTYSAERFIWITKLNNLRIQENGLERALNDNERLALMKQPYEKAKLTYAQVRSILNLSDEAIFKGLRYSGEDKKTSETKTVLMEMKAYHQIRLALEKNDLKTEWAELKVNSSLLDEIGTAFSLYKTDEDISTCLAGKLSQPVLNALLENLNFDKFIQLSLKALHKILPLMQQGLRYDEACAEIYGDHYGKKTEENHLLLPQIPADEIRNPVVLRTLTQARKVINGVVRLYSSPARIHIETGREVGKSYQDRRELEKRQEENRKQREKAISEIKTLFPNFSGEPKAKDILKMRLYYQQNAKCLYSGKPLELHRLLEQGYVEIDHALPFSRTWDDSFNNKVLVLANENQNKGNLTPFEWLDGKNNSERWKAFKALVETSAFPYTKKQRILSQKLDEKGFIERNLNDTRYVARFLCNFIADNMHLTGEGKRKVFASNGQITALLRGRWGLAKSREDNDRHHALDAVVVACSTVSMQQKITRFVRFEEGNVFTGERIDRETGEIIPLHFPAPWKFFREEVEIRIFSDNPKLELENRLIARPQANHEFVQPLFVSRMPTRKMIGQGHMETIKSAKRLNEGLSVIKMLLTKLRLKDLESMVNREREKELYEALKARLEAFNDEPAKAFAEPFMKKGGAIVKSVRVEQVQKSGVLVRDGNGVADNASMVRVDVFTKGGKYFLVPIYTWQVAKGILPNKAVIQGKNEEDWEVMDDATFRFSLHQNDLVKLVTKKKTIFGYFNGLNRATGNIDIKEHDLEKSKVKDGIHQSIGIKLALSFEKYQVDELGKNIRLCKSSKRQAVR

SEQ ID NO: 454 - protein, 121 aa, Haemophilus pittmaniae
MLNRRYAAKITRFVRFEAGDVFTGERIDRETGEIIPLHFPTPWQFFKQEVEIRIFSDNPKLELENRLPDRPQANHEFVQPLFVSRMPTRKMTGQGHMETVKSAKRLNEGISVIKMPLTKLN

SEQ ID NO: 455 - protein, 203 aa, Haemophilus pittmaniae
MVNREREKDLYDALKARLEAFNDDPAKAFAEPFIKKGGAIVKSVRVEQVQKSGVLVREGNGVADNASMVRVDVFTKDGKYFLVPIYTWQVAKGILPNKAATQYKDEEDWEVMDNSAIFKFSLHPNDLVKLVTKKKTILGYFNGLDRATGNIAIKEHDLEKSKAKGGIHQGVGIKLALSFEKYQIDELGKNIRLCNPSKCQSVR

SEQ ID NO: 456 - protein, 1052 aa, Haemophilus sputorum
MKNTSLNYVLGLDLGISSVGWAVVEIDEKENPLSLIDVGVRTFERAETQKGESLALARRLARSARRLTQRRVARLKKAKRLLKSENILLSTDECLPHQVWQLRVEGLERKLERQEWAAVLLHLIKHRGYLSQRKNESKSENKELGALLSGVANNHKLLQQTTYRTPAELAVKKFEVEEGHIRNQQGSYTHTFSRLDLLSEMELLFSRQQHFGNPFTSEKLLENLTALLMWQKPALSGDAILKMLGKCTFENEYKAAKHTYSAERFIWITKLNNLRIQENGLERALNDNERLALMKQPYEKAKLTYAQVRSILNLSDEAIFKGLRYSGEDKKTSETKTVLMEMKAYHQIRLALEKNDLKTEWAELKVNSSLLDEIGTAFSLYKTDEDISTCLAGKLSQPVLNALLENLNFDKFIQLSLKALHKILPLMQQGLRYDEACAEIYGDHYGKKTEENHLLLPQIPADEIRNPVVLRTLTQARKVINGVVRLYSSPARIHIETGREVGKSYQDRRELEKRQEENRKQREKAISEIKTLFPNFSGEPKAKDILKMRLYYQQNAKCLYSGKPLELHRLLEQGYVEIDHALPFSRTWDDSFNNKVLVLANENQNKGNLTPFEWLDGKNNSERWKAFKALVETSAFPYTKKQRILSQKLDEKGFIERNLNDTRYVARFLCNFIADNMHLTGEGKRKVFASNGQITALLRGRWGLAKSREDNDRHHALDAVVVACSTVSMQQKITRFVRFEEGNVFTGERIDRETGEIIPLHFPAPWKFFREEVEIRIFSDNPKLELENRLIARPQANHEFVQPLFVSRMPTRKMTGQGHMETIKSAKRLNEGLSVIKMLLTKLRLKDLESMVNREREKELYEALKARLEAFNDEPAKAFAEPFMKKGGAIVKSVRVEQVQKSGVLVRDGNGVADNASMVRVDVFTKGGKYFLVPIYTWQVAKGILPNKAVIQGKNEEDWEVMDDATFRFSLHQNDLVKLVTKKKTIFGYFNGLNRATGNIDIKEHDLEKSKVKDGIHQSIGIKLALSFEKYQVDELGKNIRLCKSSKRQAVR

SEQ ID NO: 457 - protein, 1338 aa, Helcococcus kunzii
MQDYYLGLDIGTNSVGWAVTDENYNLLRKKGKDLWGVRLFKEAQPATERRGHRSSRRRTIRKSLRKQLLRELFEEEINAIDKDFFLRLDESKYWLEDKKIEGKYSLFNDENFTDKDYYEKFPTIFHLRKALIESDDKEDIRLYFLAINQMMKRRGHFLIDGKLSNVEDITPFKECIQNLINEELDTEIETEFYDKAIKIVSDYSLKKTEKKNLIKDLVKETDSIEDSKKIINIFNLLISGKSKVNGIFDDEEILEKIKEDNKEDFYLTSEKYEENLEYFSQLLDYRFELISSLKSIYDYIILQEVLKGKKYLSYAQVERYKNHKEDLRKLKQLIKKYDKNGKIYYQIFRDENFKKGYVAYLGYYKKNKKNVPVKKCDYDTFSKNIKSTLDKICDKEDPLYIELIDKIEKGGFLLKQIVSTNSVIPHQVHELELDKILENLEKNYPSFKEISDGVSKIDKIKMIFNFRIPYYVGPLNDYHKDKVNSNTWIVKNEGFENENIRPWNFSKIVDEHACEEEFIKRMINECSYIPGEKVLPKSSLLYSEYMVLNELNNLRVNGDKLNPKIKKEIVENIYKKERKVTLKKIRNFLIINNYVDSKVEFSGLSDGIKANMSSYIDFAEILDDNFDNNMVEDLIEQITIHVGNVKLLTEKISNKYPNLEKKQINKIVNLKFKDWARFSRKLLVGIEGTEKETGEINTIIGFLRETNENFMELMSNRYTFSEEISEIKKKYIPNKLSKQIVDDLYVSPAVKKMIWQVLNINDELIKVLGKQPKKIFIEMARGKEEKPEVKDSRKNKLIELYKNLGKEGKEWLNRIEDKTEADFRNRALYLYYTQMGRCMYTGEIIDIERLYDKELYDLDHIIPRKMKKDDSIHKNLVLVTRNSNQYEKKDNYPVPEVIKSRENVRHLWYALKKKGLITEEKYNRLTRINPLSDKELSEFIERQLVETRQTTKVVKDLFENYYTDSKIVTVKAGLVSELRRDFEVLKCREINDLNHAHDAFLNIIVGDVWSKKFTSNPYNFVKKNREKYTLNNIFTKNQKDLRGNEIWNCAEGKKRIIKTLNKPSVLFSVENFEQTGQLFDQNIIGKQDYKEKTSYVPIKGDERLQDISKYGGYRGISGAYFFIVEHTEKNKRVKTIESLPIYMKSYVEENGLLDFCTNEMKLVDPKIIVKKLNYKSEIIVDGFKYLISGKTENRLSLETNEYLYWNHTQTTDIKKILNINEKIELEKYNGDIESERENIIKYIQIILEKFKLKPFIKRRNLPNIEINFADYETEKLLQLLVNLIPLTTKYVSPVDLTVISGSKYAGKVLIPKKISNLNEVIFISKSITGIYESRRRII

SEQ ID NO: 458 - protein, 1023 aa, Helicobacter cinaedi
MKIYSFDIGVASIGWAFIENEVLQDCGIRIFTKAENPKNGASLALPRREARGVRKRLARRRGRLNTIKQLLCKEFGLQLEDYLSNDGELPKAYTASKANPLKSPYELRTLALSQKLDSKDLVRVILHIAKHRGYGNKHAKDSKDTESGKVKKAIEFNRKTLAEKGYRSVGEYLYREFFQQSRISQNNGATEFINVRNKAGNYEHCVAQDMLKEELESILNAQRQFGFSLKQDFENKLLTKIFEQRPLKSFADKVGNCCFIAGEKRTPKDSLSAIEFIALSRTINTLINLSKESGEIYNRAIILQIVESTLKKGEISYKELREIIRLDERLRFKDPRLDYSREIKEAEKVKFLEFKQLKGFKKALGESFTTLARSQLDEIAEHIALIKDRVKLNEKLESYALTKEQREALSNLSFSAHINLSLQALKQILPFMRGDNGEQCLDYDESVEKAGLKALSKDTLKGQMLPPLNEFEPYLSNPVVARALAEYRKVLNALLKQYGSPHKIHIEYAREAKLSSTERQKYEKEQKDNYAANQAAHKKCQELGLEPSSTNLLKLKLWQEQGGLCLYSGAKITISYLQDPTALQVDHIYPYSRSFDDSYMNKCLVLTKANQEKGNRTPFEAFGTDSAKWGVITTLAQKLPHKKRRRILNTAFNDKEAGFKLRNLNDTSYIARLVADYTETYLEFLPLVESENTTLGKGQKGSKKHIAIVNGALTSTMRYYLGFASKDRDNHLHHALDAVIIGFMNDSVIKAFSDFKKTQETSKAAYYAHTLSKQEYKKQRAFIQLPSGENFRASVLEKVESVFVSKPPRKRVRGALHEATFYSPNDPKLLKNYGGTKGVERALALGKMRKVGAKIVSNGAMVRVDIFRHKSSGKFYGVPVYTMDFALGILPNKAVVVGKDKNGVIKDWLEMDSSYEFIFSLYKDDLLLVQKKEMAEPELCYFMSFNSSIAQISVAKHDNNFSTLTKNQKLLFSNATQEDVSGKSIGIQNLQVFEKWQVSVLGEVKRTQSYPRENISLASKAKK

SEQ ID NO: 459 - protein, 1023 aa, Helicobacter cinaedi
MKIYSFDIGVASIGWAFIENEVLQDCGIRIFTKAENPKNGASLALPRREARGVRKRLARRRGRLNTIKQLLCKEFGLQLEDYLSNDGELPKAYTASKANPLKSPYELRTLALSQKLDSKDLVRVILHIAKHRGYGNKHAKDSKDTESGKVKKAIEFNRKTLAEKGYRSVGEYLYREFFQQSRISQNNGATEFINVRNKAGNYEHCVAQDMLKEELESILNAQRQFGFSLKQDFESKLLTKIFEQRPLKSFADKVGNCCFIAGEKRAPKDSPSAIEFIALSRTINTLINLSKESGEIYNRAIILQIVESTLKKGEISYKELREIIRLDERLRFKDPRLDYSREIKEAEKVKFLEFKQLKGFKKALGESFTTLAISQLDEIAEHIALIKDRVKLNEKLESYALTKEQREALSNLSFSAHINLSLQALKQILPFMRGDNGEQCLDYDESVEKAGLKALSKDTLKGQMLPPLNEFEPYLSNPVVARALAEYRKVLNVLLKQYGSPHKIHIEYAREAKLSSTERQKYEKEQKDNYAANQAAHKKCQELGLEPSSTNLLKLKLWQEQGGLCLYSGAKITISYLQDPTALQVDHIYPYSRSFDDSYMNKCLVLTKANQEKGNRTPFEAFGTDSAKWGVITTLAQKLPHKKRRRILNTAFNDKEAGFKLRNLNDTSYIARLVADYTETYLEFLPLVESENTTLSKGQKGSKKHIAIVNGVLTSTMRYYLGFASKDRDNHLHHALDAVIIGFMNDSVIKAFSDFKKTQETSKAAYYAHTLSKQEYKKQRAFIQLPSGENFRVSVLEKVESVFVSKPPRKRVRGALHEATFYSPNDPKLLKNYGGTKGVERALALGKMRKVGAKIVSNGAMVRVDIFRHKSSGKFYGVPVYTMDFALGILPNKAVVVGKDQNGVIKDWLEMDSSYEFIFSLYKDDVILVQKKEMQRPELCYFVSFDTSGASIKVAKHDNNFSTLTENQKLLFSNATKEEVVGKSIGIQNLKVFEKWQVSVLGEVKRTQSYPRENISLASKAKK

SEQ ID NO: 460 - protein, 344 aa, Helicobacter pullorum
MKILGFDIGIASIGWAFVENGELKDCGVRIFTKAENPKTGDSLAMPRREARSVRRRLARRKGRLETLKRLLAKEWDLCYEDYIAADGELPKAFMGKNLTNPYVLRYEALQRLLSKEELVRVVLHIAKHRGYGNKNAKITKSEESKREQGKILSALATNASVIARYRTVGEYFYKEFCEVIKNPQGLNTNENCTQPKVRVLKPIRNKGGEYTNCILQEDLQRELRCIFEHQKGFGFSITQEFQDKILKIAFYQRSLKDFSHLVGKCTFYPDEPRAPKFSLSAIEFITKAKAINLLASIAKESGEVWDKEQWRERLDSVFSAVCERGINTIPSSSHFLNIFDILYL

SEQ ID NO: 461 - protein, 1688 aa, Ignavibacterium album
MEFKKVLGLDIGTNSIGCALLSLPKSIQDYGKGGRLEWLTSRVIPLDADYMKAFIDGKNGLPQVITPAGKRRQKRGSRRLKHRYKLRRSRLIRVFKTLNWLPEDFPLDNPKRIKETISTEGKFSFRISDYVPISDESYREFYREFGYPENEIEQVIEEINFRRKTKGKNKNPMIKLLPEDWVVYYLRKKALIKPTTKEELIRIIYLFNQRRGFKSSRKDLTETAILDYDEFAKRLAEKEKYSAENYETKFVSITKVKEVVELKTDGRKGKKRFKVILEDSRIEPYEIERKEKPDWEGKEYTFLVTQKLEKGKFKQNKPDLPKEEDWALCTTALDNRMGSKHPGEFFFDELLKAFKEKRGYKIRQYPVNRWRYKKELEFIWTKQCQLNPELNNLNINKEILRKLATVLYPSQSKFFGPKIKEFENSDVLHIISEDIIYYQRDLKSQKSLISECRYEKRKGIDGEIYGLKCIPKSSPLYQEFRIWQDIHNIKVIRKESEVNGKKKINIDETQLYINENIKEKLFELFNSKDSLSEKDILELISLNIINSGIKISKKEEETTHRINLFANRKELKGNETKSRYRKVFKKLGFDGEYILNHPSKLNRLWHSDYSNDYADKEKTEKSILSSLGWKNRNGKWEKSKNYDVFNLPLEVAKAIANLPPLKKEYGSYSALAIRKMLVVMRDGKYWQHPDQIAKDQENTSLMLFDKNLIQLTNNQRKVLNKYLLTLAEVQKRSTLIKQKLNEIEHNPYKLELVSDQDLEKQVLKSFLEKKNESDYLKGLKTYQAGYLIYGKHSEKDVPIVNSPDELGEYIRKKLPNNSLRNPIVEQVIRETIFIVRDVWKSFGIIDEIHIELGRELKNNSEERKKTSESQEKNFQEKERARKLLKELLNSSNFEHYDENGNKIFSSFTVNPNPDSPLDIEKFRIWKNQSGLTDEELNKKLKDEKIPTEIEVKKYILWLTQKCRSPYTGKIIPLSKLFDSNVYEIEHIIPRSKMKNDSTNNLVICELGVNKAKGDRLAANFISESNGKCKFGEVEYTLLKYGDYLQYCKDTFKYQKAKYKNLLATEPPEDFIERQINDTRYIGRKLAELLTPVVKDSKNIIFTIGSITSELKITWGLNGVWKDILRPRFKRLESIINKKLIFQDEDDPNKYHFDLSINPQLDKEGLKRLDHRHHALDATIIAATTREHVRYLNSLNAADNDEEKREYFLSLCNHKIRDFKLPWENFTSEVKSKLLSCVVSYKESKPILSDPFNKYLKWEYKNGKWQKVFAIQIKNDRWKAVRRSMFKEPIGTVWIKKIKEVSLKEAIKIQAIWEEVKNDPVRKKKEKYIYDDYAQKVIAKIVQELGLSSSMRKQDDEKLNKFINEAKVSAGVNKNLNTTNKTIYNLEGRFYEKIKVAEYVLYKAKRMPLNKKEYIEKLSLQKMFNDLPNFILEKSILDNYPEILKELESDNKYIIEPHKKNNPVNRLLLEHILEYHNNPKEAFSTEGLEKLNKKAINKIGKPIKYITRLDGDINEEEIFRGAVFETDKGSNVYFVMYENNQTKDREFLKPNPSISVLKAIEHKNKIDFFAPNRLGFSRIILSPGDLVYVPTNDQYVLIKDNSSNETIINWDDNEFISNRIYQVKKFTGNSCYFLKNDIASLILSYSASNGVGEFGSQNISEYSVDDPPIRIKDVCIKIRVDRLGNVRPL

SEQ ID NO: 462 - protein, 1354 aa, Indibacter alkaliphilus
MKKILGLDLGTTSIGWAFIKEPEKDVVGSEIVDMGVRIVPLSSDEENDFAKGNTISINADRTLKRGARRNLQRFKQRRNALLETFKEKNLIPSNFQYAEDGPSSTFSTLKLRDKAAKEKIELDDFVKVLLQINKKRGYKSSRKAMSEEDEGTAIDSMGIAKELYENDLTPGQWVYEALKNGRKNVPDFYRSDLQEEFKKIVNYQSEFYPDILNTSFVEDWMGKASTPTKQYFNKRGVQLAENKGKREERRLQEYKWRAEAVNFKIDLSEIALILSQINSQISNSSGYLGAISDRSKELYFKNLTVGQYLYQQVKKNPHTRLKGQVFYRQDYLDEFEKIWSVQSSFYPQLNDELKQEVRDVTIFFQRRLKSQKHLISNCEFEEHHKVVPKSHPIFQEFRIWQNLNNLTLIKKDNLNEKCELALEDKTALANELAFKKELSVKDALKVLGLKPSDWEFNFTKIEGNRTNHAFFEAFAKIIELEDGEPIDLGNLKADDILDQFSEAFLRIGIDTELLQVNSDIEGAEYEKQSYIQFWHLLYSSEDDQKLKQNLIRKFGFKPEHAKILASISLQDDHASLSSRAIKKILPHLQSGLIYDKACTYAGYNHSSSFTKDENEKRELRAELELLKKNSLRNPVVEKILNQMINVVNAILKDPNLGRPDEIRVEMARELKANAEQRKNMTSNIASATRDHEKYREILKKEFGLKRVTKNDLLRYKLWLETDGISLYTGKPIEASKLFSKEYDIEHIIPKARLFDDSFSNKTICERQLNIDKANVTAFSFLQNKLSADEFEQYQSRVKSLYGKLSKAKIQKLLMANDKIPEDFIARQLQETRYISKKAKEILFEITMRVSVTTGTITDKLREDWGLVEIMKELNWEKYDKLGLTYTIEGKHGERLNKIKDWNKRNDHRHHAMDALTVALTKPAYIQYLNNLNAKAIGNKKGTEIFAIEQKYLKRENGKLCFIPPIENIRAEAKKHLSKILVSYKAKNKVVTINKNKTKKKAGFNEQTALTPRGQLHKETVYGKSFHYSTKFEKIGASFDAQKINTVAKKEEREALLKRLAENGNDPKKAFTGKNSLNKMPIYLDLGKNIKLSEKVKTVVLEQNYTIRKNIDPDLKVDKVIDVGIKRILESRLEEFGGNAKLAFSNLEENPIWLNKEKGIPIKRVKISGVSNVESLHVKKDHFGEKILDEEGNEIPVDFVSTGNNHHVAIYEDEDGNLQDEVVNFYEAVIRRNQGESIIKYRHEEGWNFLYSIKQNEFFVFPSQDFNPNDFDLLDPKNYDLISPNLYRAQKFSKVMYGNSAVRDYVFRHHLETVLNDVKELKDVAYKQLKSLQYLNGIKKVRLNHLGQIIQVGEY

SEQ ID NO: 463 - protein, 1397 aa, Joostella marina
MKKVLGLDLGTNSIGWALVNEATKEEKKEGKSSEIIKLGVRVNPLTVDEKTNFEKGRPLSTNADRTLKRSARRNLQRYKLRRRNLIEILIKNGFITKDTPLTETGKDTTHQTLKLRAKSAKEKVDLKDFAKILLTINKKRGYKSSRKVNSDEDGLAIDGMAVAKHLYEQNLTPGQYVLNLLQKNKKYVPDFYRSDLQEEFKNIWNNQKTYYFDILTDTLFEELKDKNKSQTWAICKKPFDIAGIKQIGKASDKRLERYKWRTEGLTQKLNLEYLAIALQEINNDINKSSGYLGAISDRSKELFFNKETVGENLYRQLVKTPHTSLRNQVFYRQDYLDEFETIWETQAKFYPQLTHTLKEEIRDVIIFYQRKLKSQKSLISFCQFESWEQTYIEKETGKSKTRTVGRKVIPKSSPLFQEFKIWQNLNSLEFRNSDEGEIIEFIKLDEDIRQTVFEELNLRGNLKPNDVLKILGNYISLGKVSQWKCNFEEIEGNRTNAALYNVYQIIAENEGYGFDWAKKTASEINKELKNIFPQLGIDASILDFDFTQANFDKQTSYQLWHLLYSAEEDFKISEEDKVLYGNSSVSLKKKLHQKYGFKPEYTKLLTNISLQPDYGNLSAKAICNILPYLKENNVYSEACDLTGYNHSNFLTAEEQAKRPLKPILELLKKNSLRNPVVEKILNQMVNVVNQVIETYGKPDEIRIELTRELKKSAKERANMTKSIADATRRNDDYRKTIIKEFGIPNPTKSDVVRYRLWQELASRGYKDIFTDTEIKPQELFSNKIDIEHIIPKALLFDDSFSNKTLAFKKDNLKKANRTAYDFIANDYAPNLENYIERVESLHKDRKITRAKRNKLLMLQSKLPDGFIERDLRNSQYITKEAKKMLYEVCRTVVSTSGSITDKLREDWDLINVMKELNFPKYKALGLTEKIERYDIGAEKMKEVEIIEDWNKRNDHRHHAIDALTVAFSTHSHIQYLNHLNARRDEGHKKHAAIIAIESTITEKEGNKKRRFIAPLPNFRLQAKEHIESILVSFKNKNKVVTNNINKTKRIKKDKFNTKVQLTPRGQLHKETIYGKIKQPLEKHIKLNKSFTLEQAKLIIDKRQREKVLNHLEKYAHNSDIAFNSKTLKKNPLLISDEPLKEVLCFEEVFTIRKDISYDNFKNEKQLDKVIDEKVKQALKERINQYNGDFREAFSDIERNPIWLNKAKGICVKRATIKGVSNAEPLHTAKNHLGEEVLTENKEQIPVDYVSTGNNHHVAIYEDEDGNLQEKVVSFYEAVIRVNEGLPIIDKEYNKSLGWTFKFTMKQNEMFVFPSEDFNPTEIDLLDQKNASLISPNLFRVQKFTIKDYFFRHHLETTVENNNTLKNTTWRREGLSGIYGIIKIRLNHLGEIVQVGEY

SEQ ID NO: 464 - protein, 1060 aa, Kingella kingae
MAAKSLNYILGLDLGIASCGWAVVEMDEQENPLRLIDVGVRTFEEAENPKDGSSLAETRRLARAQRRLISRRANRMNKLCRLLKQENVLQANDYDEKGLIIGLPNQAWELRAQGLDRKLEPKEWAAVLIHLVKHRGYLSQRKNESQTADKELGALLSGMNHNHQLLQSQSNQYRTPAELAIKQFATQDGHIRNQRGAYTHTFNRLDLQNELNQLFDAQTRLGNPHVSGSLKTAINDLLMNQKAALSGDAILEMLGRCTFEPSEYKAAKNTYSAERFVWLGKLTNLRIQDNGLESALSREQRELLLNEPYNKTKLTYQQVRKLLRLPETAFFKGLRYGKDNAESATFMEMKSYHAIRKSLENKSLKSEWEKLKTQPKLLDLIGTAFSIYKTDDEIAGCLKNQLPENVIIALQGQLNFSNFMELSLKALEKLLPLMEQGLRYDEACTQIYGNRHEKIADKTEKFLPNIPADKLRNPVVLRTLTQARKVINAIIRRYGSPARVHIETGREVGKSFSDRDKLKKQQEENQEQRRRAIDEWKQFFPNAAHEPKAVDILKLRLYQLQQGKCLYSGLPIDVRRLPEKGYVEIDHALPFSRTWDDSFNNKILVLASENQNKGNQTPYEYLRGADNSESWRLFVENVQNCQFSPNKKQKIMAKQLDEKGFLERNLNDTRYVSRFLCQFISEHLHLTGKGKKRVFASNGQITALLRGRWGLSKNREENDRHHAVDAVVVACSTVAMQQKITQFVRYQKGNVFTGERIDKETGEVISIHFPTPWEHFREEVMIRVFDDNPLRTLPEKLPNRPEALHEYVMPLFVSRMPTRKMTGQGHKETIKSAKRLDEKISVLRVPLTQLKLNDLENMVNREREPALYEALKARLEQFKNDPAKAFAEPFFKQGGQQVKAVRVEIVQKSGMLLRKINGVADNGSMVRVDVFEKSGKFYLVPIYAWQVAEGILPNYAVVAHKDESDWILMDESYHFKFALYKNDLLEVQTKKGGIMGYFASLDRATGAITIREHDRDKKKCKDGEHRSIGVKMASSFKKLQVDELGKNIHETRSRKRPNIG

SEQ ID NO: 465 - protein, 1314 aa, Lactobacillus animalis
MLKKDYSIGLDIGTNSVGHAVVTDDYKVPTKKMKVFGDTSKKTIKKNMLGVLLFNEGQTAADTRLKRGTRRRYTRRKNRLRYLQEIFAPELAKVDPNFLYRLEESSLVAEDKKYDVYPIFGKREEELLYHDTYKTIYHLRSALANNDQPADLRLVYLALAHIIKYRGNFLLEGEIDLRTTDINKVFAEFSETLNENSDENLGKLDVADIFKNNTFSKTKKSEELLKLSGAKKNQLAHQLFKMMVGNMGSFKKVLGTDEEHKLSFGKDTYEDDLNDLLAEAGDQYLDIFVAAKKVYDAAILASILDVKDTQTKTVFSQAMIERYEEHQKDLIELKRVFKKYLPEKCHDFFSEPKISGYAGYIDGKVSEEDFYKYTKKTLKGIPETEEILQKIDANNYLRKQRTFDNGAIPHQVHLKELVAIVENQGKYYPFLRENKDKFEKILNFRIPYYVGPLARGNSKFAWLTRAGEGKITPYNFDEMIDKETSAEDFIKHMTINDLYLPTEPVLPKHSLLYERYTIFNELAGVRYVTENGEAKYFDAQTKRSIFELFKLDRKVSEKMVIKHLKVVMPAIRIQALKGLDNGKFNASYGTYKDLVDMGVAPELLNDEVNSEKWEDIIKTLTIFEGRKLIKRRLENYRDFLGEDILRKLSRKKYTGWGRLSAKLLDGIYDKKTHKTILDCLMTEDYSQNFMQLINDDNYSFKETIKNAQVIEKEETLAKTVQELPGSPAIKKGILQSLEIVDEIIKVMGYKPKSIVVEMARETQKTHGTRKREDRVQQIVENLKDANELPEKLPSNAELSDERKYLYCLQNGRDMYTGAPLDYDHLQFYDVDHIIPQSFLKDDSIENKVLTIKKENVRKTNGLPSEAVIQKMGSFWKKLLDAGAMTNKKYDNLRRNLHGGLNEKLKERFIERQLVETRQITKYVAQLLDQRLNYDGNGVELDEKIAIVTLKAQLASQFRSEFKLRKVRALNNLHHAHDAYLNAIVANLIMAKYPELEPEFVYGKYRKAKFKGLGKATAKNTLYANVLYFLKENEVYPFWDKARDLPTIKRYLYRAQVNKVRKAERQIGGFSDEMLVPKSDSGKLLPRKEGLDPVKYGGYAKAVESYAVLITADEVKKGKTKKVKTLVNIPIIDSKKYEADPTAYLASRGYTNVTNSFILPKYSLLEDPEGRRRYLASFKEFQKANELILPQHLVELLYWVNAKDGEQKLEDHKAEFKELFDKIMEFADKYVVAPKNSEKIRRLYEENQDATPMELGKNFVELLRYTADGAASDFKFFGENIPRKRYNSAGSLLNGTLIYQSKTGLYETRIDLGKL

SEQ ID NO: 466 - protein, 1371 aa, Lactobacillus buchneri
MKVNNYHIGLDIGTSSIGWVAIGKDGKPLRVKGKTAIGARLFQEGNPAADRRMFRTTRRRLSRRKWRLKLLEEIFDPYITPVDSTFFARLKQSNLSPKDSRKEFKGSMLFPDLTDMQYHKNYPTIYHLRHALMTQDKKFDIRMVYLAIHHIVKYRGNFLNSTPVDSFKASKVDFVDQFKKLNELYAAINPEESFKINLANSEDIGHQFLDPSIRKFDKKKQIPKIVPVMMNDKVTDRLNGKIASEIIHAILGYKAKLDVVLQCTPVDSKPWALKFDDEDIDAKLEKILPEMDENQQSIVAILQNLYSQVTLNQIVPNGMSLSESMIEKYNDHHDHLKLYKKLIDQLADPKKKAVLKKAYSQYVGDDGKVIEQAEFWSSVKKNLDDSELSKQIMDLIDAEKFMPKQRTSQNGVIPHQLHQRELDEIIEHQSKYYPWLVEINPNKHDLHLAKYKIEQLVAFRVPYYVGPMITPKDQAESAETVFSWMERKGTETGQITPWNFDEKVDRKASANRFIKRMTTKDTYLIGEDVLPDESLLYEKFKVLNELNMVRVNGKLLKVADKQAIFQDLFENYKHVSVKKLQNYIKAKTGLPSDPEISGLSDPEHFNNSLGTYNDFKKLFGSKVDEPDLQDDFEKIVEWSTVFEDKKILREKLNEITWLSDQQKDVLESSRYQGWGRLSKKLLTGIVNDQGERIIDKLWNTNKNFMQIQSDDDFAKRIHEANADQMQAVDVEDVLADAYTSPQNKKAIRQVVKVVDDIQKAMGGVAPKYISIEFTRSEDRNPRRTISRQRQLENTLKDTAKSLAKSINPELLSELDNAAKSKKGLTDRLYLYFTQLGKDIYTGEPINIDELNKYDIDHILPQAFIKDNSLDNRVLVLTAVNNGKSDNVPLRMFGAKMGHFWKQLAEAGLISKRKLKNLQTDPDTISKYAMHGFIRRQLVETSQVIKLVANILGDKYRNDDTKIIEITARMNHQMRDEFGFIKNREINDYHHAFDAYLTAFLGRYLYHRYIKLRPYFVYGDFKKFREDKVTMRNFNFLHDLTDDTQEKIADAETGEVIWDRENSIQQLKDVYHYKFMLISHEVYTLRGAMFNQTVYPASDAGKRKLIPVKADRPVNVYGGYSGSADAYMAIVRIHNKKGDKYRVVGVPMRALDRLDAAKNVSDADFDRALKDVLAPQLTKTKKSRKTGEITQVIEDFEIVLGKVMYRQLMIDGDKKFMLGSSTYQYNAKQLVLSDQSVKTLASKGRLDPLQESMDYNNVYTEILDKVNQYFSLYDMNKFRHKLNLGFSKFISFPNHNVLDGNTKVSSGKREILQEILNGLHANPTFGNLKDVGITTPFGQLQQPNGILLSDETKIRYQSPTGLFERTVSLKDL

SEQ ID NO: 467 - protein, 315 aa, Lactobacillus casei
MFKDYLKQLEDDGTAKAIRQLYDRYIDGDDAKPFVREDFVKALTKEVTAHPNAKSPELLERLAQPDFMLKQRNKANGAIPVQMQQRELDQIIKNQSVYYDWLAAPNPVEKHRKSMPYQLDELLNFRIPYYVGPLVTAKEQKAARGGVFAWMVRKDPDGNITPYNFDEKVDREASANTFIQRMKTTDTYLIGEDVLPKQSLLYQSYEVLNELNNVRVNDNKLSFDQKQQVLGELFERHNTVTIKQFVDNLLAHGDYDRIPEVRGLADEKRFLSSLSTYNQLKGILHEAIDDSDKQTDMVDCKINPNAVRTKKISFL

SEQ ID NO: 468 - protein, 236 aa, Lactobacillus casei
MFKDYLKQLEDDGTAKAIRQLYDRYIDGDDAKPFVREDFVKALTKEVTAHPNAKSPELLERLAQPDFMLKQRNKANGAIPVQMQQRELDQIIKNQSVYYDWLAAPNPVEKHRKSMPYQLDELLNFRIPYYVGPLVTAKEQKAARGGVFAWMVRKDPDGNITPYNFDEKVDREASANTFIQRMKTTDTYLIGEDVLPKQSLLYQSYEVLNELNNVRVNDNKLSSSIFKSSATMITNS

SEQ ID NO: 469 - protein, 1389 aa, Lactobacillus casei
MIIRTYELKTITTIAILKMFQLLTGGLSMTKLGKPYGIGVDIGSNSIGFAAVDENSHLIRLKGKTVIGARLFEEGKAAADRRASRTTRRRLSRNRWRLSFLRDFFESHITPTGPNFFMRQKYSEISPKDKARYKYEKRLFNDRTDAEFYQQYPTMYHLRNRLLTDPSKADVREIYFAIHHILKSRGHFLTSGYAKDFNTNKVALNEIFPALQDAYAQVYPDLDITFDENKVNEFKTVLLNEKATPSDTQRALVNLLLAEDGDKDILKQQKQVLTEFAKAVVGLKTKLNVALGTEVDSSEATVWNFSLGQLDDKWAGIESAMTDEGTEILDQIRDLYRARLLNGIVPAGKTLSQAKVDDYAQHHEDLELFKDYLKQLEDDGTAKAIRQLYDRYIDGDDAKPFVREDFVKALTKEVTAHPNAKSPELLERLAQPDFMLKQRNKANGAIPVQMQQRELDQIIKNQSVYYDWLAAPNPVEKHRKSMPYQLDELLNFRIPYYVGPLVTAKEQKAAQGGVFAWMVRKDPDGNITPYNFDEKVDREASANTFIQRMKTTDTYLIGEDVLPKQSLLYQRYEVLNELNNVRVNNEKLSIEQKQQVIRELFERHNSVTIKQFAENLRAHGDYAHIPEIRGLADEKRFLSSLSTYRQLKSLLPDAIDDPAKQADIENIIAWSTVFEDAAIFKTKLKEINWLDSQTITKLSNIRYRGWGQFSHKFLNGLTLGNGHTIIQELFLSNNNLMQILTDETLQKKMTELNADKLKAANINDAIDDAYTSPSNKKALRQVLRVIEDIKRAADGQDPSWLYVETADGGGTPGKRTRARQHQLQEIYANAAHELIDSAVRGELEDKIADKADFNDRLVLYFMQGGRDIYTGTPLNIDQLSSYDIDHILPQSLIKDNSLDNRVLVHAIINREKNATFASTIYAQKMNATWRQWHEAGLISGRKLRNLQMRPDQIDKYASGFVARQLVETRQIIKLTEQIVAAQYPETKIIAVKAGLSHQLREELEFPKNRDVNHYHHAFDAFLAARIGTYLLKRFPNLQAFFTYGKFKKADVKKLRGFNFIRDITHAEDKIVVKDTGEVIWDKKRDVDELDRIYNFKRMLITHEVHFEKADLFKQTVYGAKDSKEAGGKKQLISKKKGYPVDIYGGYTQETGSYLSVVRLTKKAMYAVVKVSTRDAAKLAVAKSISEQKENETLNDIIDEKLSKISKNGKITHELFEVVLPRVGQKTLFKNSKYNLFLVNSDTYMHNYQELWMPREYQKMWKDISLSKYGDAQTEDQLDQIFGFIVSQVNSYFNLYDINQFRKKLNDAADKFATLPMRDTDDMQGKIATIGQLLIGLQANAARSDLRNLDIKTPLGLLQIPNGISLDSDTSVVYQSPTGLLEREVHLSDL

SEQ ID NO: 470 - protein, 412 aa, Lactobacillus casei
MIKDNSLDNRVLVHPLVNREKDTIFASTRFAKQTNGMWRQWHAAGLISSRKLRNLQMRPDEIDKYASGFVARQLVETRQIIKLTEQIVADQYPDTKIIAVKAGLSSQLRKELDFPKNREVNHYHHAFDAFLAARIGTYLLKRYPNLEPFFTYGKFKKTEVKKLKSFNFIRDMTHAKDKIVAKETGEIVWDNASDINELDRIYNFKRMLITHEVRFETASLFKQTLYAAKNPKNRGGSRQLIPKKKGYLVDIYGGYTQETGSYLSVVRLTKKAMYAVVKVSTRDAAKLAVAKSISEQKENETLKKIIDGKLSKTSKKGKTTHQLFEIVLPRVGQKTLFKNSKYNQFLVNSDTYMHNYQELWMPREYQRMWKDILLSNHGDAQIEGQLDQIFKFIVSQVNSYFNLYDINQFRKK

SEQ ID NO: 471 - protein, 234 aa, Lactobacillus casei
MKVTKKTETIFKVVKIATSQVAALNKARSRSTAEELSVLTELLKPKFSKVGKNGKITDTPFEVVLPRVPREQLFYNAKYGFFMVNSDTMFHNFQEIWVSRSDQKILQQIRKAKIDYPNVDQDLDNLFHNLADQIVKYFDLYSIAGFKEKISQSQNTFNDLAVDDTDQSVGKITVINELLKGAQANGMTGSLKVLKISTPFGFTQDKSGVLTKDSSIIYQSPTGLFERSVRLTDL

SEQ ID NO: 472 - protein, 566 aa, Lactobacillus casei
MQILTDEVLKQKIAELNAHELKASGIYAAIDDAYTSPSNKKALRQVLSVIDDITNAAGQAPNWLYIETADGDGVPGKRTNSRQRKIQEIYVNAAQELITSSVRGELEDKIASRADFTDRLVLYFMQGGRDIYTGEPLNIDNLSSYDIDHILPQSLIKDNSLDNRVLVHPLVNREKDTIFASTRFAKQMNGMWRQWHAAGLISSRKLRNLQMRPDEIDKYASGFVARQLVETRQIIKLTEQIVADQYPDAKIIAVKAGLSSQLRKELDFPKNREVNHYHHAFDAFLAARIGTYLLKRYPNLEPFFTYGKFKKTEVKKLKSFNFIRDMTHAKDKIVAKETGEIVWDNASDINELDRIYNFKRMLITHEVRFETASLFKQTLYAAKNSKNRGGSRQLIPKKKGYLVDIYGGYTQETGSYLSVVRLTKKAMYAVVKVSTRDAAKLAVAKSISEQKENETLKKIIDGKLSKTSKKGKTTHQLFEIVLPRVGQKTLFKNSKYNQFLVNSDTYMHNYQELWMPREYQRMWKDILLSNHGDAQLEGQLDQIFKFIVSQVNSYFNLYDINQFRKK

SEQ ID NO: 473 - protein, 1363 aa, Lactobacillus casei
MTKLGKPYGIGVDIGSNSIGFAAVDENSHLIRLKGKTVIGARLFEEGKAAADRRASRTTRRRLSRNRWRLSFLRDFFESHITPTDPNFFMRQKYSEISPKDKARYKYEKRLFNDRTDAEFYQQYPTMYHLRNRLLTDPSKADVREIYFAIHHILKSRGHFLTSGYAKDFNTNKVALNEIFPALQDAYAQVYPDLDITFDENKVNEFKTVLLDEKATPSDTQRALVNLLLAEDGDKDILKQQKQVLTEFAKAVVGLKMKLNVALGTEVDSSEATAWNFSLGQLDDKWAGIESAMTDEGTEILDQIRDLYRARLLNGIVPAGKTLSQAKVDDYEQHHEDLELFKDYLKQLEDDGMAKVIRQLYDRYIDGDDAKPFVREDFVKALTKEVTAHPNAKSPELLERLVQPDFMLKQRNKANGAIPVQMQQRELDQIIKNQSVYYDWLAAPNPVEKHRQSMPYQLDELLNFRIPYYVGPLVTAKEQKAAQGGVFAWMVRKDPDGNITPYNFDEKVDREASANTFIQRMKTTDTYLIGEDVLPKQSLLYQSYEVLNELNNVRVNDNKLSFDQKQQVLGELFERHNTVTIKQFVDNLLAHGDYDRIPEVRGLADEKRFLSSLSTYNQLKGILHEAIDDSDKQTDIEKIIAWSTIFEDKAIFKTKLNEISWLTAGMINSLANIRYRGWGQFSHKLLNELTLSTGRTVFEELLISSHNLMQILTDEVLKQKIAELNAHELKASGIYAAIDDAYTSPSNKKALRQVLSVIDDITNAAGQAPNWLYIETADGDGVPGKRTNSRQRKIQEIYANAAQELITGSVRGELEDKIASRADFTDRLVLYFMQGGRDIYTGEPLNIDNLSSYDIDHILPQSLIKDNSLDNRVLVHPLVNREKDTIFASTRFAKQMNGMWRQWHAAGLISSRKLRNLQMRPDEIDKYASGFVARQLVETRQIIKLTEQIVADQYPDAKIIAVKAGLSSQLRKELDFPKNREVNHYHHAFDAFLAARIGTYLLKRYPNLEPFFTYGKFKKTEVKKLKSLKSFNFIRDMTHAKDKIVAKETGEIVWDNASDINELDRIYNFKRMLITHEVRFETASLFKQTLYAAKNSKNRGGSRQLIPKKKGYLVDIYGGYTQETGSYLSVVRLTKKAMYAVVKVSTRDAAKLAVAKSISEQKENETLKKIIDGKLSKTSKKGKTTHQLFEIVLPRVGQKTLFKNSKYNQFLVNSDTYMHNYQELWMPREYQRMWKDILLSNHGDAQLEGQLDQIFKFIVSQVNSYFNLYDINQFRKKIADATDKFAKLPTHDTDNARGKIATIGQLLIGLQANAMRSDLRNLDIKTPFGLLQIGTGITLDLDTSIIYQSPTGLFEREVPLTDL

SEQ ID NO: 474 - protein, 1360 aa, Lactobacillus casei
MTKLGKPYGIGVDIGSNSIGFAAVDENSHLIRLKGKTVIGARLFEEGKAAADRRASRTTRRRLSRNRWRLSFLRDFFESHITPTDPNFFMRQKYSEISPKDKARYKYEKRLFNDRTDAEFYQQYPTMYHLRTRLLTDPSKADVREIYFAIHHILKSRGHFLTPGYAKDFNTNKVALNEIFPALQDAYAQVYPDLDITFDENKVNEFKTVLLNEKATPSDTQRALVNLLLAEDGDKDILKQQKQVLTEFAKAVVGLKTKLNVALGTEVDSSEATVWNFSLGQLDDKWAGIESAMTDEGTEILDQIRDLYRARLLNGIVPAGKTLSQAKVDDYAQHHEDLELFKDYLKQLEDDGTAKAIRQLYDRYIDGDDAKPFVREDFVKALTKEVTAHPNAKSPELLERLAQPDFMLKQRNKANGAIPVQMQQRELDQIIKNQSVYYDWLAAPNPVEKHRKSMPYQLDELLNFRIPYYVGPLVTAKEQKAAQGGVFAWMVRKDPDGNITPYNFDEKVDREASANTFIQRMKTTDTYLIGEDVLPKQSLLYQSYEVLNELNNVRVNDNKLSFDQKQQVLGELFERHNTVTIKQFVDNLLAHGDYDRIPEVRGLADEKRFLSSLSTYNQLKGILHEAIDDADKQTDIENIIAWSTIFEDKAIFKTKLNEISWLNAGMINSLANIRYRGWGQFSHKLLNELTLSTGRTVFEELLISSRNLMQILTDEVLKQKIAELNAHELKASGIYAAIDDAYTSPSNKKALRQVLSVIDDITNAAGQAPNWLYIETADGDGVPGKRTNSRQRKIQEIYANAAQELITGSVRGELEDKIASRADFTDRLVLYFMQGGRDIYTGEPLNIDNLSSYDIDHILPQSLIKDNSLDNRVLVHPLVNREKDTIFASTRFAKQMNGMWRQWHAAGLISSRKLRNLQMRPDEIDKYASGFVARQLVETRQIIKLTEQIVADQYPDTKIIAVKAGLSSQLRKELDFPKNREVNHYHHAFDAFLAARIGTYLLKRYPNLEPFFTYGKFKKTEVKKLKSFNFIRDMTHAKDKIVAKETGEIVWDNASDINELDRIYNFKRMLITHEVRFETASLFKQTLYAAKNSKNRGGSRQLIPKKKGYLVDIYGGYTQETGSYLSVVRLTKKAMYAVVKVSTRDAAKLAVAKSISEQKENETLKKIIDGKLSKTSKKGKTTHQLFEIVLPRVGQKTLFKNSKYNQFLVNSDTYMHNYQELWMPREYQRMWKDILLSNHGDAQLEGQLDQIFKFIVSQVNSYFNLYDINQFRKKIADATDKFAKLPTHDTDNARGKIATIGQLLIGLQANAMRSDLRNLDIKTPFGLLQIGTGITLDLDTSIIYQSPTGLFEREVPLTDL

SEQ ID NO: 475 - protein, 700 aa, Lactobacillus casei
MTKLGKPYGIGVDIGSNSIGFAAVDENSHLIRLKGKTVIGARLFEEGKAAADRRASRTTRRRLSRNRWRLSFLRDFFESHITPTDPNFFMRQKYSEISPKDKARYKYEKRLFNDRTDAEFYQQYPTMYHLRTRLLTDPSKADVREIYFAIHHILKSRGHFLTSGYAKDFNTNKVALNEIFPALQDAYAQVYPDLDITFDENKVNEFKTVLLDEKATPSDTQRALVNLLLAEDGDKDILKQQKQVLTEFAKAVVGLKTKLNVALGTEVDSSEATAWNFSLGQLDDKWAGIESAMTDEGTEILDQIRDLYRARLLNGIVPAGKTLSQAKVDDYEQHHEDLELFKDYLKQLEDDGMAKAIRQLYDRYIDGDDAKPFVREDFVKALTKEVTAHPNAKSPELLERLVQPDFMLKQRNKANGAIPVQMQQRELDQIIKNQSVYYDWLAAPNPVEKHRQSMPYQLDELLNFRIPYYVGPLVTAKEQKAAQGGVFAWMVRKDPDGNITPYNFDEKVDREASANTFIQRMKTTDTYLIGEDVLPKQSLLYQSYEVLNELNNVRVNDNKLSFDQKQQVLGELFERHNTVTIKQFVDNLLAHGDYDRIPEVRGLADEKRFLSSLSTYNQLKGILHEAIDDSDKQTDIEKIIAWSTIFEDKAIFKTKLNEISWLNAGMINSLANIRYRGWGQFSHKLLNELTLSTGRTVFEA

SEQ ID NO: 476 - protein, 330 aa, Lactobacillus casei
MTKLGKPYGIGVDIGSNSIGFAAVDENSHLIRLKGKTVIGARLFEEGKAAADRRASRTTRRRLSRNRWRLSFLRDFFESHITPTDPNFFMRQKYSEISPKDKNRYKYEKRLFNDRTDAEFYQQYPTMYHLRNRLLTDPSKADVREIYFAIHHILKSRGHFLTPGDAKDFNTNKVALNEIFPALQDAYAQVYPDLDITFDENKMNEFKTVLLNEKATPSDTQRALVNLLLAEDGDKDILKQQKQVLTEFAKAVVGLKTKLNVALGTEVDSSEATAWNFSLGQLDDKWAGIESAMTDEGTEILDQIRDLYRARLLNGIVPAGKTLSQAKVDD

SEQ ID NO: 477 - protein, 330 aa, Lactobacillus casei
MTKLGKPYGIGVDIGSNSIGFAAVDENSHLIRLKGKTVIGARLFEEGKAAADRRASRTTRRRLSRNRWRLSFLRDFFESHITPTDPNFFMRQKYSEISPKDKNRYKYEKRLFNDRTDAEFYQQYPTMYHLRNRLLTDPSKADVREIYFAIHHILKSRGHFLTPGDAKDFNTNKVALNEIFPALQDAYAQVYPDLDITFDENKMNEFKTVLLNEKATPSDTQRALVNLLLAEDGDKDILKQQKQVLTEFAKAVVGLKTKLNVALGTEVDSSEATAWNFSLGQLDDKWAGIESAMTDEGTEILDQIRDLYRARLLNGIVPAGKTLSHAKVDD

SEQ ID NO: 478 - protein, 1361 aa, Lactobacillus casei
MTKLGKPYGIGVDIGSNSIGFAAVDENSHLIRLKGKTVIGARLFEEGKAAADRRASRTTRRRLSRNRWRLSFLRDFFESHITPTGPNFFMRQKYSEISPKDKARYKYEKRLFNDRTDAEFYQQYPTMYHLRNRLLTDPSKADVREIYFAIHHILKSRGHFLTSGYAKDFNTNKVALNEIFPALQDAYAQVYPDLDITFDENKVNEFKTVLLNEKATPSDTQRALVNLLLAEDGDKDILKQQKQVLTEFAKAVVGLKTKLNVALGTEVDSSEATVWNFSLGQLDDKWAGIESAMTDEGTEILDQIRDLYRARLLNGIVPAGNTLSQAKVDDYAQHHEDLELFKDYLKQLEDDGTAKAIRQLYDRYIDGDDAKPFVREDFVKALTKEVTAHPNAKSPELLERLAQPDFMLKQRNKANGAIPVQMQQRELDQIIKNQSVYYDWLAAPNPVEKHRKSMPYQLDELLNFRIPYYVGPLVTAKEQKAAQGGVFAWMVRKDPDGNITPYNFDEKVDREASANTFIQRMKTTDTYLIGEDVLPKQSLLYQRYEVLNELNNVRVNNEKLSIEQKQQVIRELFERHNSVTIKQFAENLRAHGDYAHIPEIRGLADEKRFLSSLSTYRQLKSLLPDAIDDPAKQADIENIIAWSTVFEDAAIFKTKLKEINWLDSQTITKLSNIRYRGWGQFSHKFLNGLTLGNGHTIIQELFLSNNNLMQILTDETLQKKMTELNADKLKAANINDAIDDAYTSPSNKKALRQVLRVIEDIKRAADGQDPSWLYVETADGGGTPGKRTRARQHQLQEIYANAAHELIDSAVRGELEDKIADKADFNDRLVLYFMQGGRDIYTGTPLNIDQLSSYDIDHILPQSLIKDNSLDNRVLVHAIINREKNATFASTIYAQKMNATWRQWHEAGLISGRKLRNLQMRPDQIDKYASGFVARQLVETRQIIKLTEQIVAAQYPETKIIAVKAGLSHQLREELEFPKNRDVNHYHHAFDAFLAARIGTYLLKRFPNLQAFFTYGKFKKADVKKLRGFNFIRDITHAEDKIVVKDTGEVIWDKKRDVDELDRIYNFKRMLITHEVHFEKADLFKQTVYGAKDSKEAGGKKQLISKKKGYPVDIYGGYTQETGSYLSVVRLTKKAMYAVVKVSTRDAAKLAVAKSISEQKENETLNDIIDEKLSKISKNGKITHELFEVVLPRVGQKTLFKNSKYNLFLVNSDTYMHNYQELWMPREYQKMWKDISLSKYGDAQTEDQLDQIFGFIVSQVNSYFNLYDINQFRKKLNDAADKFATLPMRDTDDMQGKIATIGQLLIGLQANAARSDLRNLDIKTPLGLLQIPNGISLDSDTSVVYQSPTGLLEREVHLSDL

SEQ ID NO: 479 - protein, 1128 aa, Lactobacillus casei
MTKLGKPYGIGVDIGSNSIGFAAVDENSHLIRLKGKTVIGARLFEEGKAAAKRRAGRTTRRRLSRNRWRLSFLRDFFESHITPTDPNFFMRQKYSEISPKDKARYKYEKRLFNDRTDAEFYQQYSTMYHLRNRLMTDPSRADVREIYFAIHHILKSRGHFLTPGDAKDFNTNDVALDEIFPALQDAYAQVYPDLGITFDEDKANEFKTILLNEIATSIDTQRALVKLLLAEEDDKDILKQQKQVLTEFAKAVVGLKTKLNLALGTEVDSSEATAWNFSLGQLDDKWAGIESAMTDEGTEILDQIRDLYRARLLNGIVPTGKTLSQAKVDDYTQHHEDLQLFKAYLKQLEDDGTAKAIRQLYDRYIDGDDAAPFLRENFVKALTKDVTAHPNTKSPELLERLAQPDFMLKQRNKANGAIPVQMQQRELDQIIKNQAVYYDWLAAPNPVEKHRKSMPYQLDELLNFRIPYYVGPLVTAKEQKAAQGGVFAWMVRKDPEGNITPYNFDEKVDREASANTFIQRMKTTDTYLIGEDVLPKQSLLYQRYEVLNELNNVRVNNEKLSIEQKQQVIRELFERHNSVTIKQFAENLRAHGDYAHIPEIRGLADEKRFLSSLSTYRQLKSLLPEAIDDPAKQADIENIIAWSTVFEDAAIFKTKLKEISWLGSEAITKLSNIRYRGWGQFSRKFLNGLTLGNGHTIIQELLLSTNNLMQILTDETLQKKMTELNADKLKTANINDAIDNAYTSPSNKKALRQVLRVVDDIKRAADGQDPSWLYVETADGGGTPGKRTRARQHQLQEIYANAAHELIDTAVRGELEDKISDKADFNDRLVLYFMQGGRDIYTGAPLNIDQLSSYDIDHILPQSLIKDNSLDNRVLVHAIINREKNATFASTIYAQKMNATWRQWHEAGLISGRKLRNLQMRPDQIDKYASGFVARQLVETRQIIKLTEQIVAAQYPDTKIIAVKAGLSHQLREELEFPKNRDVNHYHHAFDAFLAARIGTYLLKRFPNLQAFFTYGKFTKADVKKLRGFNFIRDITHAEDKIVAKDTGEVVWDKQRDVDELDRIYNFKRMLITHEVRFETADLFKQTVYGARDSKEAGGSKQLIPKKKDIQLIFMGAISERTRPILPL

SEQ ID NO: 480 - protein, 1366 aa, Lactobacillus casei
MTKLGKPYGIGVDIGSNSIGFAAVDENSHLIRLKGKTVIGARLFEEGKAAAYRRASRTTRRRLSRNRWRLSFLRDFFESHITPTDPNFFMRQKYSEISPKDKARYKYEKRLFNDRTDAEFYQQYPTMYHLRTRLLTDPSKADVREIYFAIHHILKSRGHFLTPGYAKDFNTNKVALNEIFPALQDAYAQVYPDLDITFDENKVNEFKTVLLNEKATPSDTQRALVNLLLAKEGDRDILKQQKQVLTEFAKAVVGLKTKLNVALGTEVDSSEATAWNFSLGQLDDKWAGIESAMTDEGTEILDQIRDLYRARLLNGIVPAGKTLSQAKVDDYAQHHEDLELFKDYLKQLEDDGTAKAIRQLYDRYIDGDDAKPFVREDFVKALTKEVTAHPNAKSPELLERLAQPDFMLKQRNKANGAIPVQMQQRELDQIIKNQAVYYDWLAAPNPVEKHRQSMTYQLDELLNFRIPYYVGPLVTAKEQKAAQGGVFAWMVRKDPDGNITPYNFDEKVDREASANTFIQRMKTTDTYLIGEDVLPKQSLLYQSYEVLNELNNVRVNDNKLSFDQKQQVLGELFERHNTVTIKQFVDNLLAHGDYDRIPEVRGLADEKRFLSSLSTYNQLKGILHEAIDDADKQTDIENIIAWSTIFEDKAIFKTKLNEISWLNAGMINSLANIRYRGWGQFSHKLLNELTLSTGRTVFEELLISSRNLMQILTDEVLKQKIAELNAHELKASGIYAAIDDAYTSPSNKKALRQVLSVIDDITNAAGQAPNWLYIETADGDGVPGKRTNSRQRKIQEIYANAAQELITGSVRGEFEDKIASRADFTDRLVLYFMQGGRDIYTGEPLNIDNLSSYDIDHILPQSLIKDNSLDNRVLVHPLVNREKDTIFASTRFAKQMNGMWRQWHAAGLISSRKLRNLQMRPDEIDKYASGFVARQLVETRQIIKLTEQIVADQYPDTKIIAVKAGLSSQLRKELDFPKNREVNHYHHAFDAFLAARIGTYLLKRYPNLEPFFTYGKFKKTEVKKLKSLKSLKSFNFIRDMTHAKDKIVAKETGEIVWDNASDINELDRIYNFKRMLITHEVRFETASLFKQTLYAAKNSKNRGGSRQLIPKKKGYLVDIYGGYTQETGSYLSVVRLTKKAMYAVVKVSTRDAAKLAVAKSISEQKENETLKKIIDGKLSKTSKKGKTTHQLFEIVLPRVGQKTLFKNSKYNQFLVNSDTYMHNYQELWMPREYQRMWKDILLSNHGDAQIEGQLDQIFKFIVSQVNSYFNLYDINQFRKKIADATDKFAKLPTHDTDNARGKIATIGQLLIGLQANAMRSDLRNLDIKTPFGLLQIGTGITLDLDTSIIYQSPTGLFEREVPLTDL

SEQ ID NO: 481 - protein, 1354 aa, Lactobacillus coryniformis
MTLHYNVGLDIGTNSVGYTIVDDNGKILQVKGKNGYGVRVFKEGATAAERRIFRTTHRRLKRRKWRLRLLQDFFEPYILPQDDGFFIRRKESNLVLNDRDEDTASLFNDRSDRDFYQAYPTIYHLRQALMTEKRQFDVREIYLAMHHIIKYRGHFLLNGTVNNFTNNKIDLHSDFEELNALLLNVIPELKFQIDLDHSTMFQTTLLNTTISRSGRQRDLVKSFYNGSDDKQLAKQQKSVATELLKAILGLKAKFHKLFNLDLLETTEWEFSFDAEDIDDKLAKLEPLMTENQQQVMDILQRIFAAITLNGIVPEGKTLSASKVDSYQKHKQDLKLLKAIAQHSDKKTATVLQTAYNEYINGIASKPLKQEDFYKRLTNAVKKSSDPQVADMLALIDQEKFLPKQRTKENGAIPHQLHQLELERIIDNQKDYYPWLAELNPNQARQKVAKYKLSELVAFRVPYYVGPLIEPEVQQATSNAHFAWMARKEAGPITPWNFDQKVDRNVSAERFIKRMTTKDTYLLAEDVLPLHSLLYQRFIVLNELNNVRVNGQKLTKKQKQAVYQDLFKRQPHVTKKQFKSYLVQTGEFAESSKIEGLANETSFNSGLTTENELRKIFGAQLDEARYQVDFEQIIEWATLFEDAKILRTKLAEITWLTTEQIEKLAGIRYRGWGRFSRKLLAGLRDQNGQQIIDLLWDTPNNFMVIVSQAAFSEAITKENEKLIDRRGAQDVITDLYTSPQNKKALRQVLAIVADVQKAMGGVPPQRIFIEFAREDEKNPRRSVERSRQLEKLYQTISNEFLINSEVRQELKEAVDQKVNFKDRLFLYFLQGGVDLYSGKRINIDQLSHYDIDHILPQSFIKDDSLDNRVLVSQKLNRSKSDSVPLSEFANYKFGPAMQAKWLQLKEAGLLSKRKYDNLTLDPTKLSKFAPLGFVNRQLVETRQVIKLAANLLASEETKVVTIKANMTHQVRKELDFPKNRNVNNYHHAFDAYLTAFVGIFLSKRYPKLKPYFTYGDFQKGNKLPDLKNFNFLYELKNKDRSIDSNTGEIIWDKQRDLAYMNKIYNFKKVTVVHEVLTKSGALYNQTLYKASEDKASGRGTKQLIRKKDNMPTELYGGYTGSTSAFMSIVRLWKKDKPYYKVVGIPTRMAAKLANQAQLLDYLTKKFTTRKLVKKTGDYKTTVERFELVVPKVGFNQLVIDGGQPFMLGSATYQYNARELFISKEAVKALNKQLSTHVDLVQVFDEILVQVNRWFPLYDTNGFREKLSHGRDRFMKLNDSFEEKSDTQIDVLNRILIGFHANAARTNLKILGLGTDLGFMTQQAGIRLTEKAILVHQSPSGLFERKVALRDLKGLR

SEQ ID NO: 482 - protein, 544 aa, Lactobacillus crispatus
KYYLYFMQLGRDAYTGKPINIDEVSQYYDIDHILPQSFIKDDSLNNRVLVAKPINNGKSDGVPLKLFGDNLATGLGITVKQMWNNWADKGLINKAKQNNLFLDPENINKHQASGFIRKQLVETSQIIKLATTILQAEYPKTKIIVVKASSNHYLRNEFDLYKSREVNDYHHAIDAYLTTICGNLLYQAYPKLRPFFVYGQFKKFSSDPKKENEILKKTKNFDFVAKLLGSKAPNEIRSQQGKVLFEKNKIRLQLNKAYNYKYMLVSRDTTTKNQEMFGMTIYPRAERDIAKSRKLIEKRKGFSTDIYGGYTGTAAAYMAIVRINKTKSSQYKVIAVPMTKRAILNKAEKEGNYEKILKQILSPSILYNDKGKRKAGVISFDIIKGKVPYNQVVQDGNKKFLLKSAIYLCNAKQLVLSEEAMRVITGHWLDSDKQDQELLDVYDEILEKIDRYLPLFDIRDFRNKLHKGREKFLKLNAEDKFKAIIQILKGLHDNSDTGELKDIGITVPFGQLQNNSGITLSSDTILVYQSPTGLFEKRVKISSL

SEQ ID NO: 483 - protein, 298 aa, Lactobacillus crispatus
MDELNKISVNGKKLSVSVKQELYEDLFKKNNTVSAKQLKNWLIENQKLPYIKIKGLADQTKFNSSLSTYIKLKKSGLFVDKLDSNEFRDDFEKIIEWSTIFEDKQIYIQKLQTIDWLTAKQIQFLQNIRLQGWGRLSKKLLTAIVDSNGQNIIEQLWNSQQIFMSIVNKADIKGTITDANQDLMHSNSMEDILSEAYTSPANKKMIRQVVKVVHDIQKAASGQAPKQIAIEFARESRRNSKLSQTRGHKLQDIYQKISGDIVNKNLKDKLAEYIKNNQLSVWEKTSFQMNKNDQDFLF

SEQ ID NO: 484 - protein, 279 aa, Lactobacillus crispatus
MNGKKLSVSVKQELYEDLFKKNNTVSAKQLKNWLIENQKLPYIKIKGLADQTKFNSSLSTYIKLKKSGLFVDKLDSNEFRDDFEKIIEWSTIFEDKQIYIQKLQTIDWLTAKQIQFLQNIRLQGWGRLSKKLLTAIVDSNGQNIIEQLWNSQQIFMSIVNKADIKGTITDANQDLMHSNSMEDILSEAYTSPANKKMIRQVVKVVHDIQKAASGQAPKQIAIEFARESRRNSKLSQTRGHKLQDIYQKISGDIVNKNLKDKLAEYIKNNQLNKDKYYTR

SEQ ID NO: 485 - protein, 538 aa, Lactobacillus crispatus
MQLGRDAYTGKPINIDEVSQYYDIDHILPQSFIKDDSLNNRVLVAKPINNGKSDGVPLKLFGDNLATGLGITVKQMWNNWADKGLINKAKQNNLFLDPENINKHQASGFIRKQLVETSQIIKLATTILQAEYPKTKIIVVKASSNHYLRNEFDLYKSREVNDYHHAIDAYLTTICGNLLYQAYPKLRPFFVYGQFKKFSSDPKKENEILKKTKNFDFVAKLLGSKAPNEIRSQQGKVLFEKNKIRLQLNKAYNYKYMLVSRDTTTKNQEMFGMTIYPRAERDIAKSRKLIEKRKGFSTDIYGGYTGTAAAYMAIVRINKTKSSQYKVIAVPMTKRAILNKAEKEGNYEKILKQILSPSILYNDKGKRKAGVISFDIIKGKVPYNQVVQDGNKKFLLKSAIYLCNAKQLVLSEEAMRVITGHWLDSDKQDQELLDVYDEILEKIDRYLPLFDIRDFRNKLHKGREKFLKLNAEDKFKAIIQILKGLHDNSDTGELKDIGITVPFGQLQNNSGITLSSDTILVYQSPTGLFEKRVKISSL

SEQ ID NO: 486 - protein, 206 aa, Lactobacillus crispatus
MQLGRDAYTGKPINIDEVSQYYDIDHILPQSFIKDDSLNNRVLVAKPINNGKSDGVPLKLFGDNLATGLGITVKQMWNNWADKGLINKAKQNNLFLDPENINKHQASGFIRKQLVETSQIIKLATTILQAEYPKTKIIVVKASSNHYLRNEFDLYKSREVNDYHHAIDAYLTTICGNLLYQAYPKLRPFFVYGQFKKFSSDPKKRK

SEQ ID NO: 487 - protein, 857 aa, Lactobacillus crispatus
MTKLNNEYMVGLDIGTNSCGWVATDFDNNILKMHGKRALGSHLFDEGVSAADRRAFRTTRRRIKRRKWRLKLLEEIFDEEMAKVDPNFFARLKESGLSPLDTRKNVSSIVFPTKKMDKQFYKKFPTIYHLRNALMKQDKKFDLRAIYIAIHHIVKYRGNFLSNSSISNFSASKIEIDRFVNELNDLYSIFLPESGVIFDAGNASKVEDIIRNEQMFKLDKIKEIADVLPDTENKSGLKLSKKISKEISKAILGYKAKFEIILQVNVDKTDSSIWNFKLNDENADVNLSEITSDLTDTQLQILDLVRNLFSAISLLNIVDEGSTLSESMIRKYNDHAQDLKLLKTVIKNHSDRKKAHNLQLAYDKYVNNRHFVDVETKKAFPNKHLYRKSDFYEIVKKNLDASKEAVQIRKEIALDKFMPKQRSDENGVIPFQLNQIELDKIIENQGKYYPFLKEINPIKAHRMQAPYKLDELIRFRVPYYVGPMIEPTNSSYPQTRQNQSFAWMVRKAKGRITPWNFDEKVDRQKSANNFIKRLTTKDTYLFGEDVLPANSLLYQKYTVLDELNKISVNGKKLSVSVKQELYEDLFKKNNTVSAKQLKNWLIENQKLPYIKIKGLADQTKFNSSLSTYIKLKKSGLFVDKLDSNEFRDDFEKIIEWSTIFEDKQIYIQKLQTIDWLTAKQIQFLQNIRLQGWGRLSKKLLTAIVDSNGQNIIEQLWNSQQIFMSIVNKADIKGTITDANQDLMHSNSMEDILSEAYTSPANKKMIRQVVKVVHDIQKAASGQAPKQIAIEFARESRRNSKLSQTRGHKLQDIYQKISGDIVNKNLKDKLAEYIKNNQLSVWEKTSFQMNKNDQDFLF

SEQ ID NO: 488 - protein, 857 aa, Lactobacillus crispatus
MTKLNNEYMVGLDIGTNSCGWVATDFDNNILKMHGKRALGSHLFDEGVSAADRRAFRTTRRRIKRRKWRLKLLEEIFDEEMAKVDPNFFARLKESGLSPLDTRKNVSSIVFPTKKMDKQFYKKFPTIYHLRNALMKQDKKFDLRAIYIAIHHIVKYRGNFLSNSSISNFSASKIEIDRFVNELNDLYSIFLPESGVIFDAGNASKVEDIIRNEQMFKLDKIKEIADVLPDTENKSGLKLSKKISKEISKAILGYKAKFEIILQVNVDKTDSSIWNFKLNDENADVNLSEITSDLTDTQLQILDLVRNLFSAISLLNIVDEGSTLSESMIRKYNDHAQDLKLLKTVIKNHSDRKKAHNLQLAYDKYVNNRHFVDVETKKAFPNKHLYRKSDFYEIVKKNLDASKEAVQIRKEIALDKFMPKQRSDENGVIPFQLNQIELDKIIENQGKYYPFLKEINPIKAHRMQAPYKLDELIRFRVPYYVGPMIEPTNSSYPQTRQNQSFAWMVRKAKGRITPWNFDEKVDRQKSANNFIKRLTTKDTYLFGEDVLPANSLLYQKYTVLDELNKISVNGKKLSVSVKQELYEDLFKKNNTVSAKQLKNWLIENQKLPYIKIKGLADQTKFNSSLSTYIKLKKSGLFVDKLDSNEFRDDFEKIIEWSTIFEDKQIYIQKLQTIDWLTAKQIQFLQNIRLQGWGRLSKKLLTAIVDSNGQNIIEQLWNSQQIFMSIVNKADIKGTITDANQDLMHSNSMEDILSEAYTSPANKKMIRQVVKVVHDIQKAASGQAPKQIAIEFARESRRNSKLSQTRGHKLQDIYQKISGDIVNKNLKDKLAEYIKNNQLSVWEKNSFQMNKNDQDFLF

SEQ ID NO: 489 - protein, 347 aa, Lactobacillus crispatus
MVNLKSLVLILKKENEILKKTKNFDFVAKLLGSKAPNEIRSQQGKVLFEKNKIRLQLNKAYNYKYMLVSRDTTTKNQEMFGMTIYPRAERDIAKSRKLIEKRKGFSTDIYGGYTGTAAAYMAIVRINKTKSSQYKVIAVPMTKRAILNKAEKEGNYEKILKQILSPSILYNDKGKRKAGVISFDIIKGKVPYNQVVQDGNKKFLLKSAIYLCNAKQLVLSEEAMRVITGHWLDSDKQDQELLDVYDEILEKIDRYLPLFDIRDFRNKLHKGREKFLKLNAEDKFKAIIQILKGLHDNSDTGELKDIGITVPFGQLQNNSGITLSSDTILVYQSPTGLFEKRVKISSL

SEQ ID NO: 490 - protein, 534 aa, Lactobacillus crispatus
RDAYTDKPINIDEVSQYYDIDHILPQSFIKDDSLNNRVLVAKPINNGKSDGVPLKLFGDNLATGLGITVKQMWNNWADKGLINKAKQNNLFLDPENINKHQASGFIRKQLVETSQIIKLATTILQAEYPKTKIIVVKASSNHYLRNEFDLYKSREVNDYHHAIDAYLTTICGNLLYQAYPKLRPFFVYGQFKKFSSDPKKENEILKKTKNFDFVAKLLGSKAPNEIRSQQGKVLFEKNKIRLQLNKAYNYKYMLVSRDTTTKNQEMFGMTIYPRAERDIAKSRKLIEKRKGFSTDIYGGYTGTAAAYMAIVRINKTKSSQYKVIAVPMTKRAILNKAEKEGNYEKILKQILSPSILYNDKGKRKAGVISFDIIKGKVPYNQVVQDGNKKFLLKSAIYLCNAKQLVLSEEAMRVITGHWLDSDKQDQELLDVYDEILEKIDRYLPLFDIRDFRNKLHKGREKFLKLNAEDKFKAIIQILKGLHDNSDTGELKDIGITVPFGQLQNNSGITLSSDTILVYQSPTGLFEKRVKISSL

SEQ ID NO: 491 - protein, 278 aa, Lactobacillus crispatus
SVNGKKLSVSVKQELYEDLFKKNNTVSAKQLKNWLIENQKLPYIKIKGLADQTKFNSSLSTYIKLKKSGLFVDKLDSNEFRDDFEKIIEWSTIFEDKQIYIQKLQTIDWLTAKQIQFLQNIRLQGWGRLSKKLLTAIVDSNGQNIIEQLWNSQQIFMSIVNKADIKGTITDANQDLMHSNSMEDILSEAYTSPANKKMIRQVVKVVHDIQKAASGQAPKQIAIEFARESRRNSKLSQTRGHKLQDIYQKISGDIVNKNLKDKLAEYIKNNQLNKDKYY

SEQ ID NO: 492 - protein, 277 aa, Lactobacillus crispatus
SVNGKKLSVSVKQELYEDLFKKNNTVSAKQLKNWLIENQKLPYIKIKGLADQTKFNSSLSTYIKLKKSGLFVDKLDSNEFRDDFEKIIEWSTIFEDKQIYIQKLQTIDWLTAKQIQFLQNIRLQGWGRLSKKLLTAIVDSNGQNIIEQLWNSQQIFMSIVNKADIKGTITDANQDLMHSNSMEDILSEAYTSPANKKMIRQVVKVVHDIQKAASGQAPKQIAIEFARESRRNSKLSQTRGHKLQDIYQKISGDIVNKNLKDKLAEYIKNNQLNKDKY

SEQ ID NO: 493 - protein, 1368 aa, Lactobacillus curvatus
MSRPYNIGLDIGTSSIGWSVVDDQSKLVSVRGKYGYGVRLYDEGQTAAERRSFRTTRRRLKRRKWRLGLLREIFEPYITPIDDTFFLRQKQSNLSPKDQRKLYTQTSLFNDRTDRAFYDDYPTIYHLRYRLMTEKRQFDIREIYLAMHHIVKYRGHFLNEAPVSSFKSSEINLVAHFDRLNTIFADLFSESGFQLETDKLAEVKALLLDNQQSASNRQRQALSLIYTPSTNKAVEKQNKAIATELLKAILGLKAKFNVLTGIEAEDVKAWTLTFNAENFDEEMVKLESSLDDNAHQIIESLQELYSGVLLAGIVPENQSLSQAMITKYDDHQKHLKMLKAVREALAPGDRQRLKQAYDQYVDGQENTKAYSKEDFYGDITKALKNNPDHPIVSEIKKLIELDQFMPKQRTKDNGAIPHQLHQQELDRIIENQQQYYPWLAELNPNSKRQTVAKYKLDELVAFRVPYYVGPLITAEQQRQSSDAKFAWLIRKAEGRITPWNFDDKVDRQASANEFIKRMTTTDTYLLAEDVLPKQSLIYQRFEVLNELNGLKIDDQPITTELKQAIFTDLFMQKISVTVKNIQDYLVSEKRYASRPAITGLSDENKFNSRLSTYHDLKMIVGDAVDDVDKQADLEKCIEWSTIFEDGKIYSAKLNEIDWLTDQQRVQLAAKRYRGWGRLSAKLLTQIVNANGQRIMDLLWDTTDNFMRIVHSEDFDKLITEANQMMLAENDVQDVINDLYTSPQNKKALRQILLVVNDIQKAMKGQAPERILIEFAREDEVNSRLSVQRKRQVEQVYQNISNELLNNTEIRNELKDLSNSALSNTRLFLYFMQGGRDMYTGDSLNIDRLSTYDIDHILPQSFIKDNSLDNRVLVSQKMNRSKADQVPTDFTSVELGQKMQIQWEQMLRAGLITKKKYDNLTLNPDHISKYAMKGFINRQLVETRQVIKLATNLLMEQYGEDNIELITVKSGLTHQMRTEFDFPKNRNLNNHHHAFDAYLTAFVGLYLLKRYPKLKPYFVYGEYQKASQQDKWRNFNFLNGLKKDELVDENTEAVIWDKESGLAYLNKIYQFKKILVTRGVHENSGALFNQTLYAAKDDKASGQGGKQLIPAKQDRSTALYGGYSGKTVAYMCIVRIKNKKGDLYKVCGVETSWLAQLKQLTDEDSQKAFLEQKISPQFTKVKKQKGNIIEAVEEFEVIAPHILINQRFFDNGQELTLGSATYKHNEQELILDKTAVKLLNGALPLTQSEELAEQVYDEILDQVMHYFPLYDTNQFRAKLSTGKAAFMKLPWKSQWDGNKMVQVGQQVILDRILIGLHANAAMSDLKVLKMTTPFGMIQQSTGITLSADTQIIYQSPTGLFERRVALRDL

SEQ ID NO: 494 - protein, 669 aa, Lactobacillus delbrueckii
MAKPKDYTIGLDIGTNSVGWVVTDDQNNILRIKGKKAIGARLFTEGKVAAERRSFRTTRRRLSRRRWRIKMLEELFDEEIAKVDPSFFARLHESWISPKDKRKRYSAIVFPSPEEDKKFHESYPTIYHLRDKLMKDDQKHDIREIYIAVHQMIKARGNFLHDESVETYRSGMSSLGGRSERNILSVQTLEELNDLFAENEGTEEVELNVASAEQINDILTGGHLNADSQKEISNLLLPSSFPSFDDKAKEKQVKKLINNVATNISKAWLGYKADFSTILNLAKVDKDQKKIFAFALQGGDEEDKVQELESLLEQSQTDIVDRLIEIRHAIVLSEIVPVGMTLSEAMIDKYDQHKEDLITLKAVIRNTKDKKKAAKLQAIYDLYVKKRHADLAKAMKLTGIKKRSELLDPEELKKGISSLLDDSPEAVEIKQRLEEKTFLPLQRSNNNGVIPNQLHQVELDEIIKKQSKYYPFLAEKNPDESEEAQKKAPTKLDALLTFRVPYYVGPMITKEEQEAQNGHSFAWMVRRDPQDHEAITPWNFEKKVDKMASATQFIKRMTTKDTYLLGEDVLPASSLKYQLFTVLNELNNLRVNGKKLTSDEKEQVIEGLFKKQKTVKADKFVKYWQAKHIGADIKVKGLSDPSKFNSTMSTYIDFKKIFGDQLNDVNRQR

SEQ ID NO: 495 - protein, 544 aa, Lactobacillus delbrueckii
MTGCADYDVDHIMPQSFVKDDSLDNRVLVARAVNNQKSDKVPALLFGNKVVADLGITVREMWDKWQKLGMISKRKLSNLLTDPDALTEYRAQGFIRRQLVETSQVIKLTATILQSEFPDSKIIEVPAKYNSIVRKQFDLYKSREVNDFHHAIDAYLSTIVGNYLYQVYPNLRRMFVYGEFKKFSSNAEESAHDVARRVKSMNFLDDLLRGTHGDNIYCRSTGEIVFNRNDIISKLKQAYSFKQMLVTQEVFTKKSALFDQTVYPSPERDSKKRSGLIPRKKGMDTEIYGGYSGNKDAYFVLAEAVKEKGHTLQIVGVPIRALNTLKNSANYSEKLLEIIKPQVMFNKDTGKPIKGIKDVKILMDKIPCRQPVLEGESYYMLASSKYRYSLKQISLSQMSMKYILDYIDDPNFNKHEMINIDQQDEKECLLSVYDEILEKMDKYLPLFDIRSFRKKLHDGRDAFIALPVASEEKKPGEVDVIRKILKGLHANADITNLAELGFGTAALGALVSTGGIKISDDAVFIYQSPTGLFERRVKVSDLLK

SEQ ID NO: 496 - protein, 1356 aa, Lactobacillus farciminis
MTKKEQPYNIGLDIGTSSVGWAVTNDNYDLLNIKKKNLWGVRLFEEAQTAKETRLNRSTRRRYRRRKNRINWLNEIFSEELAKTDPSFLIRLQNSWVSKKDPDRKRDKYNLFIDGPYTDKEYYREFPTIFHLRKELILNKDKADIRLIYLALHNILKYRGNFTYEHQKFNISNLNNNLSKELIELNQQLIKYDISFPDDCDWNHISDILIGRGNATQKSSNILKDFTLDKETKKLLKEVINLILGNVAHLNTIFKTSLTKDEEKLNFSGKDIESKLDDLDSILDDDQFTVLDAANRIYSTITLNEILNGESYFSMAKVNQYENHAIDLCKLRDMWHTTKNEEAVEQSRQAYDDYINKPKYGTKELYTSLKKFLKVALPTNLAKEAEEKISKGTYLVKPRNSENGVVPYQLNKIEMEKIIDNQSQYYPFLKENKEKLLSILSFRIPYYVGPLQSAEKNPFAWMERKSNGHARPWNFDEIVDREKSSNKFIRRMTVTDSYLVGEPVLPKNSLIYQRYEVLNELNNIRITENLKTNPIGSRLTVETKQRIYNELFKKYKKVTVKKLTKWLIAQGYYKNPILIGLSQKDEFNSTLTTYLDMKKIFGSSFMEDNKNYDQIEELIEWLTIFEDKQILNEKLHSSKYSYTPDQIKKISNMRYKGWGRLSKKILMDITTETNTPQLLQLSNYSILDLMWATNNNFISIMSNDKYDFKNYIENHNLNKNEDQNISDLVNDIHVSPALKRGITQSIKIVQEIVKFMGHAPKHIFIEVTRETKKSEITTSREKRIKRLQSKLLNKANDFKPQLREYLVPNKKIQEELKKHKNDLSSERIMLYFLQNGKSLYSEESLNINKLSDYQVDHILPRTYIPDDSLENKALVLAKENQRKADDLLLNSNVIDRNLERWTYMLNNNMIGLKKFKNLTRRVITDKDKLGFIHRQLVQTSQMVKGVANILDNMYKNQGTTCIQARANLSTAFRKALSGQDDTYHFKHPELVKNRNVNDFHHAQDAYLASFLGTYRLRRFPTNEMLLMNGEYNKFYGQVKELYSKKKKLPDSRKNGFIISPLVNGTTQYDRNTGEIIWNVGFRDKILKIFNYHQCNVTRKTEIKTGQFYDQTIYSPKNPKYKKLIAQKKDMDPNIYGGFSGDNKSSITIVKIDNNKIKPVAIPIRLINDLKDKKTLQNWLEENVKHKKSIQIIKNNVPIGQIIYSKKVGLLSLNSDREVANRQQLILPPEHSALLRLLQIPDEDLDQILAFYDKNILVEILQELITKMKKFYPFYKGEREFLIANIENFNQATTSEKVNSLEELITLLHANSTSAHLIFNNIEKKAFGRKTHGLTLNNTDFIYQSVTGLYETRIHIE

SEQ ID NO: 497 - protein, 1313 aa, Lactobacillus fermentum
MHYLDEIFAPHLQEVDENFLRRLKQSNIHPEDPAKNQAFIGKLLFPDLLKKNERGYPTLIKMRDELPVEQRAHYPVTNIYKLREAMINEDRQFDLREVYLAVHHIMKYRGHFLNNASVDKFKVGRIDFYKSFNVLNEAYEELQNGEGSFTIEPSKVEKIGQLLLDTKMRKLNRQKAVAKLLEVKVADKEETKRNKQIATAMSKLVLGYKADFATVAMANGNEWKIDLSSETSEDEIEKFREELSDAQNDILTEITSLFSQIMLNEIVPNGMSISESMMDRYWTHERQLAEVKEYLATQPASARKEFDQVYNKYIGQAPKERGFDLEKGLKKILSKKENWKEIDELLKAGDFLPKQRTSANGVIPHQMHQQELDRIIEKQAKYYPWLATENPATGERDRHQAKYELDQLVSFRIPYYVGPLVTPEVQKATSGAKFAWAKRKEDGEITPWNLWDKIDRAESAEAFIKRMTVKDTYLLNEDVLPANSLLYQKYNVLNELNNVRVNGRRLSVGIKQDIYTELFKKKKTVKVSDVASLVMAKTRGVNKPSVEGLSDPKKFNSNLATYLDLKSIVGDKVDDNRYQTDLENIIEWRSVFEDGEIFADKLTEVEWLTDQQRSALVKKRYKGWGRLSKKLLTGIVDENGQRIIDLMWNTDQNFMQIVNQPVFKEQIDQLNQKAITNDGMTLREWVESVLDGAYTSPQNKKAIWQVVRVVEDIVKAVGNAPKSISIEFARNEGNKGEITRSRRTQLQKLFEDQAHELVKDTSLTEELEKAPDLSDRYYLYFTQGGKDMYTGDPINFDEISTKYDIDHILPQSFVKDDSLDNRVLVSRAENNKKSDRVPAKLYAAKMKPYWNQLLKQGLITQRKFENLTMDVDQNIKYRSLGFVKRQLVETRQVIKLTANILGSMYQEAGTDIIETRAGLTKQLREEFDLPKVREVNDYHHAVDAYLTTFAGQYLNRRYPKLRSFFVYGEYMKFKHGSDLKLRNFNFFHELMEGDKSQGKVVDQQTGELITTRDEVAKSFDRLLNMKYMLVSKEVHDRSDQLYGATIVTAKESGKLTSPIEIKKKRPVDLYGAYTNGTSAFMTIIKFTGNKPKYKVIGVPTTSAVGLKRVGKPGSESYNQELHRIIKSNPKVKKDFEIVVPHVSYSQLIVDDDCKFTLASDTYQHPATQLVLSKESMEIIADDFKFVKENTATADEQLVRVFDEIVNQMNHYFTIFDQRSNRQKVTKARDKFVSLPTESEYEGAKKTQVGKTEVITNLLMGLHANSAQGDLKVLGLSTFGFFQSSGGLNLSEDAMIVYQSPTGLFERRICLKDI

SEQ ID NO: 498 - protein, 1327 aa, Lactobacillus florum
MTEQQQPYNIGLDIGTSSIGWAVTDQNDKLLHIRGHNGIGVRLFKEGESAAERRGFRTTRRRLSRRRWRLRFLDRIFDAELAKVDPNFLARLKQSNISPLDPNKQMFGNILFDDPQFDDQKFHQQYPTIYHLRSALAQPDAPQADVRLIYLALHHMIKFRGHFLNGAAVEKFHGGQLHLESEFQELNQIFSNQQRDHVQLQTSSLDEVATILKDNQRTPSDRQRELSARLFVPVDKTIDKENKKLATELLKAVLGLKAKFDVILGVEATDPQAFKLQFSSDDFDDKIAELASELTDEANEILTVLQRLYFSLNLADILTNRQTKQVADSISTAMINRYDDHKHHLKMLKELEAQVTQEQRDGLKKAYDEYIDGDKPTIDTFYTNIKKNLDDSELANQIKSLIDLQAFMPKQRSKENGSIPHQLHQRELDQLIEVQGKYYPWLLAAKDKLDALIAFRVPYYVGPMIDPNQSDDPQNTKFAWMVRKEAGEITPWNFEEKVDKTSSATNFIKRMTTTDTYLLGEPVLPKNSLLYQQFTVLNELNKLKVNGKALTVDQKKYLYEHVCKKQRRVTLKKLSDCLMARGDFPMGAIFTGTTDQKNMNNTLKTYQDFQEIFGDEIDNPDRQVDFEKMIEWSAIFEDREIFKLKLAELNWLTSEQLERVSKKRYQGWGRLSQKLLTHIVNENGERIIDQLWNTNQNFMEIMGQDSVKQAIQEHNGANVAQTGINETIDELYTSPQNKKAIRQILLVVDDIKKAVGYAPANIMMEFAREDRDDHRLIASRARQLEKTYQEISKNWFDNESVTQELKDQIKNKTKFTDRLYLYFIQGGIDLYTGHPLNIDQLSSYDIDHILPQSFLLDNSLNNRVLTSQAENRVHKEDRLPGETVANKMRPTWKMMREQGLMTQRKYNNLTLKPDQISKFNNRGQFINRQLVETRQVIKLAADIMSQKYQADQTKVVTVKANLTHHMREKFNFYKSRNVNDYHHAFDAYLTLFVGNWLLKEYPKLQPYFVYGDFAKTGTNNLKSFNFLYRFERDHKLNDKGAIDTDKDQQLGYMKRIYRFKKMLVTKQLETNEGALYGQTLYPAPKNDKKTRNLINSKKNRPSDIYGGYSNENGSFLTLVKLKKGSKYDYRLVAVPVSKISEIKESELATIEKAIAPQFLKSSGKYRDFQVVLSKILINQKVIDDGMIFTIGSKSYKHNAKQVVLSDNSIQIVSTLSRISDKEKLITVFDEIVDITSKYLPWYKVNDVEKTKMLFRQMQDIDEMKKIIDNSLIGLHCNASITDLGKVGLSKYWGRFVLTAGISLTVDAQLIYQSPTGLFEHRVKVSDL

SEQ ID NO: 499 - protein, 1386 aa, Lactobacillus hominis
MTKITEDYIVGLDIGTNSCGWVAMDSKNTILRMHGKTAIGSHLFDAGNSAADRRAFRTTRRRIKRRKWRLKLLEEIFDSHLAKVDPYFFARLKESGLSPLDTRKNVSSIIYPTSLEDKKFYVDNPTIYHLRYKLMTEDRKFDLREVYLAIHHIVKYRGNFLYNTPVKAFEASKIDVKGSLKKLNELYEGLDSEFNVELDSNNALEIENIIRDKKIFKINKVKEINQLLSLKTEDKERTKLMKDVSKQIVNAILGYKTKFETILLKDVSKDEADDWEFKLTDVDADNKFENLIGDLNENEQEILLVIRKLANAITLSNIVEEGKTLSESMKDKYKKHSDDLKLLKQVISDHPDRDKAKKLALAYDLYVNNRHGKILQAKDILEKKKTLSKEDFYKEIKKNLDDSKESQEILDAISLDSFMPKQRTNENGVIPYQLHQLELDKIIENQGKYYPFLKEVNPVSSHLKQAPYKLDELIRFRVPYYVGPLISPNESTKNKQTKKNQNFAWMIRKEQGQITPWNFDQKVDRMASANKFIKRMTTIDTYLLGEDVLPANSLLYQKFTVLNELNNVKINGKRISVPLKQELYNNLFKKNSTVTTNKLKSYLKENYKLIKVEIKGLSDEKKFNSGLTTYNKLKNLKIFDQQIDDPNYNKDFERIIEWSTIFEDKAIYKEKLKTIDWLSDRQIDKLSKIRMQGWGQLSKKLLSQLTDNNGQTIIEQLWDSQNNFMQIVNQADFKDAIAVANQNLLVDTSVEDILNEAYTSPANKKAIRQVVKVVDDIVKATSGKVPKQIAIEFTRDADDNAKISQSRANKLRKVYKEMSNELASETIRNELERVAKDQKLLKDKHYLYFMQLGRDAYTGELIDIDNLEQYDIDHVLPQSFIKDDSLENRVLVKKAVNNGKSDNVPVKLYGNRMATDLGMTIRHMWEKWKEQGLITKTKYNNLIIDPDKINKYESSGFIHRQLVETSQIIKLVSTILQSKYPDTEIIVVKARYNHYLRKRLNLYKSREVNDYHHAIDAYLSAICGNLLYQVYPYLRPFFVYGQYKKFSSEPEKEKIIYDKTRRYNFISQIFENKDNDIISRETKKKVFDKKDIIEKLKRAYNYKYMLVSRETETHDQEMFKMTVYPRLSRDTKKSRNLIPKKKDMPTEIYGGYTNNSDAYMIIARINKKKGPEYRVFGVPMRELVNLRKAEKNGHYKAYLKQVLEPEIMYSKNGKKNKTISSFEIVKAKVPYKQVILDGDKKFMLASSTYVQNAKQLTLSQYSMQAITDNCENDTEEEKALVEAYDEILTNIDKYLPLFDINKFREKLHAGREKFVDLPLAEKKETILQVLNGLHDNAVMPKIKSLGLSTPLGFMQFHTGVSLSENAKLIYQSPTGLFEKRLKISDL

SEQ ID NO: 500 - protein, 270 aa, Lactobacillus iners
MITYLKDNDDITLSFPKDQLINIFKNSNLNSTEKSDQLKPFFGRTNLEKGIIKLLSGGKQDLSNMFRDETLKNSNYKNLKFSDNRFDDERDGYAADLGDRIDLLILLKQIYDASILESMMSQARVSIDGHKYISSAKVCAYEKHKSDLKRLKSLIKKYLPSEYNNIFRKITEKDNYVAYSKSNITNNKREKALKYVKYVDFTKYLTKKLKTIKTQDAEDDQEIFEIKGELEKQSFLPKQRTLDNSIIPYQLHLMELKKYLIINLNIMTFC

SEQ ID NO: 501 - protein, 255 aa, Lactobacillus iners
MITYLKDNDDITLSFPKDQLINIFKNSNLNSTEKSDQLKPFFGRTNLEKGIIKLLSGGKQDLSNMFRDETLKNSNYKNLKFSDNTFDDERDGYAADLGDRINLLILLKQIYDASILESMMSQARVSIDGHKYISSAKVCAYEKHKSDLKRLKSLIKKYLPSEYNNIFRKITEKDNYVAYSKSNITNNKREKALKYVEYVDFTKYLTKKLKTIKTQDAEDDKEIFEIKGELEKQSFLPKQRTLDNSIIPYQLHLME

SEQ ID NO: 502 - protein, 343 aa, Lactobacillus iners
MLAKDDQEGITVKDKIISLLTFRLPYYIGPVNPAVHGKFAWVKRLANGKVTPWNYKEKIDIDASHEEFIKTKLSKCSFLIGCDVLPKNSLLYQKYMVLSELNTIKFNGVNISEKLKDDIYQNLFKNIQKVTKKRLQNYIKEHENIIGDVIVTGIDNAFKQGLVSYLKFKKIIGDKIDDDRYQKVLEKIIRDITLYDECAGKKIKKEYKDSDLFTEDELNKIVKLTFNDWGRLSAELLDQLEGEDTVSGETGKIIEFMQKHNYNLMQLMSKKFTFKYKIDEINKSYYQHDKFNYKSMIDSLYVSPATKRILWQSLKVVHEISKIMKHDPEKIFYRNGTFQRRSS

SEQ ID NO: 503 - protein, 447 aa, Lactobacillus iners
MLYDHKLIGDKKYARLIRSKAFTDDELAGFIARQLVETRQATKETADLLKRLCPKSRIVYAKAQNASIFRQKFDIPKSRTINDLHHAQDAYLNIVVGNIFDTKFTQDPRNFIKNTKDSRNYNLEKIYDYNVERNNYVAWIAPDSKTNGTIANVKCNLSTKDFRVTRPSFYKKGALFNQNLSRKGSNLAPIKEHSPKSNPLKYGGYSGKNNSFFVVVAGKDNKGKDIVKLIPVNTLIYNKMLHCDYKAKQELLTSYVANNFAINNFRIVKDDIKMYSLVKIDGAYYYLVGGTDERIEVKNAMQLLLSKDSIKAVKILEKESKDQFANIKNYKDIDIKLGRTFNEVISKYTNSVFGKSMLISDKYRKDIFKSVDKSILEFNSLNTIAKADNLLKFVTSMRPAGSVDALKMVGLIERIRKSNVISNFNEFKLINQSVTGLFENEEDLLKL

SEQ ID NO: 504 - protein, 667 aa, Lactobacillus iners
MQKHNYNLMQLMSKKFTFKSKIDEINKSYYQHDKFNYKSMIDSLYVSPATKRILWQSLKVVHEISKIMKHDPEKIFIEMARSKEDHPKRKLSRKADLKQVYKDSKKQIISIIGKDKYQDLSNELDNKDDRDLRWDNLYLYYTQLGRSMYSLKPIDISELMNKNLYDQDHIFPKSKKYDDSIENRVLVEKELNVKKSDIYPISDANIIPQKIKGQVESFWKMLYDHKLIGDKKYARLIRSKAFTDDELAGFIARQLVETRQATKETADLLKRLCPKSRIVYAKAQNASIFRQKFDIPKSRTINDLHHAQDAYLNIVVGNIFDTKFTQDPRNFIKNTKDSRNYNLEKIYDYNVERNNYVAWIAPDGETNGTIANVKCNLSTKDFRVTRPSFYKKGALFNQNLSRKGSNLAPIKEHSPKSNPLKYGGYSGKNNSFFVVVAGKDNKGKDIVKLIPVNTLIYNKMLHCDYKAKQELLTSYVANNFAINNFRIVKDDIKMYSLVKIDGAYYYLVGGTDERIEVKNAMQLLLSKDSIKAVKILEKESKDQFANIKNYKDIDIKLGRTFNEVVSKYTNSVFGKSMLISDKYRKDIFKSVEKSILEFNHLDTIGKADNLLKFVTLMRPSGSAHSLKMVGLIERIRKSNVISNFNEFKLINQSVTGLFENEEDLLKL

SEQ ID NO: 505 - protein, 1395 aa, Lactobacillus jensenii; identical to SEQ ID NO: 118

SEQ ID NO: 506 - protein, 1382 aa, Lactobacillus mucosae
MDIGTNSIGWTAIDDHFSLLRVKGKNAIGVRTFKEGETAADRRGFRTARRRLSRRRWRLQFLDEFFAPYLAEVDPNFLARLKQSDISAKDPAKNQEYMGKLLFPDQEAASDGNGYPTLIQMRKAMPAEKAADFPVFNIYQLRYALMNEKRKFDLREIYLAVHHIVKYRGNFLNNTSVDKFKADQIDFNKSFETLNDLFRQVQPIAPFQIDLTKVDELGKLLLDTKQKKLDRQKAVAKLLPLIEDGTDKEIVKAHQQTAREISKLILGYKAKVGLILQNNLDQTLDMSTENSDDQLMQIAEELDDYQMELINQLSLLYSQIMLNEIVPNGETVSASMLNRYYKHRCQLKELKDYGAAQDKKTREQLDHLYAEYIGQIPKDSKFDFTKDLKKLMDKSDLGQKIKDEIEAGDYLPKQRTSANGVIPHQMHQQELDQIIENQKEYYPWLAEPNPVEKNIKNAKYKLDQLVSFRVPYYVGPMITLADQQKTSKASFAWAVRKKAGKITPWNFYDMIDREKSANNFIKRMTNKDTYLLSEDVLPASSLLYQKFTVLNELNNIRVNGRKLQPALKQAIYTDLFQKRKTVNLKTLTNFLAIHEPTLTKPKIEGLSNGRSFNSSLGTYIDMSKILGDSLDDLNYRDDIEKIIEWSTVFEDSEIYGVKLQEIQWLTNEQREKLVRKRYQGWGRLSKKLLTGITDENGQRIIDLMWDTSKNFMQIVHQPVFEEQIAELNQQLLQDADKAPLEVVDDILADAYTSPQNKKAIRQVVKVVADVVKAVGNAPASISIEFARNEDRNKELKNSRRHSIEKLYHETAEKLVKQTNLLEELGNVKDLNDRYYLYFTQAGRDMYDGTPINIDEISTHYEIDHILPQSFLKDNSLDNRVLVKKSENAAKSDRVPAKLYGAKMRAFWKQLKESQLISNRKYLNLTTDPEQVDKYQMQGFVHRQLVETRQIIKLAANIFGSLYPDSAVIETRAELTKQLREKFSLYKVRDVNDYHHAVDAYLTAFAGHYLYQRYPKLRPMFVYGDYAKIYADDLKRLRSVNLFHDLEKDQYNSGTAVNPETKEKIVDVDWLSDYVSKIQHFKYMLISKAVYTQHGQLYGATILPVAQVDKISAPIGIKDDKPVDIYGAYTNEVAAYMAIVRVNGKKPKYKVVSVPVRMLQRLKMAEQKGHDQYMQTLHDVLLRNFTSLKKNRKTGLKEAVVKDFDVLVPCVRYNQLVIDGDTKFTLGSATYQHNAKQLVLCNHSLETLANNFEYVRKHPDEADERMIMLYDDILDQVNHYFTLYDKNKFREKLNAGRDKYLKLPTFSQFENNKKTAIGKSEAIINILRGLHANAAITNLKCLGVSTPFGQLQSPSGIELSENAKLVYQSPTGLFSREVLLKDL

SEQ ID NO: 507 - protein, 1382 aa, Lactobacillus pentosus
MKKIVNYNLGLDIGTSSIGYAAIDDQGRPVRHQNKTVMGVRLFKEGKTAESTRIFRGTRRRLSHRHWRLGYLDRIFDNEIAKVDENFLPRLKASKRARSDEKRSFRGSLLFPETGDDAYYQKYPTIYHLRYALITQKKQFDIRLIYLALHHMIKYRGNFLDTTPVSAFNIHDIDLTDQFASLNDCYQLLDMDFEFQFDLNNIEQVQKLLLDETLSKTKRQAAVSKVLVMSTGNKAFDDQQNGIASEFIKALLGGPFDLSKILNLSVADVKSWKLHMTDKDVDDTLNSLVEELDENHKQIVNLLQMIYSQVMMLGLLNGQQSISASMIERYDDHAKHWAALKKLLPALGEQEQSTIIHAYTAYTGHSRTKQLSRAEFYTKVNSILKKHENIAEATGLIELIDRNEFMPKQRDAVNGVIPHQLHQRELQLIIQNQQKYYPFLAAKAYPDADETMIEQLLSFRVPYYAGPLVDRDFINESSDQEQAMQNTKFSWLKRREAGEITPWNFEQKVDVQETANRFIKRLTTKDTYLMTEDVLPKESLIYQRFEVLNELNAIRINDRRLTAENKQLAFQQLFMAGNTKNVSIKKFRNFVFDSLKFPEKVKITGFAGQHNFLAKLSTYHDFKKIFGERVDHTDLQPDFERIVEWCTIFEDRHIYREKLKEIQWLSQSEIDQLVLIRNHGWGRLSKRLLTGIRDSDGRTVMDQLWFGTDNFMRIISQSDFAAAIANENRTQLNQHGLEDVLDSAFMSPQNKKAIRQVLKVVDDIEQTLGCPPKKVMIEFTRSPDKKKQRTVTRLEKVQQAYKAVADQLAGQSIVSELDQYANTHSKLSDTYYLYFMQLGRDLYSGKPIDIDSPMLDDDHILPRAFMKDNSLDNRALTEKPINNTKAAKFPSKVFGQQKEVTDFWKLLRRCGLMSNIKEKHLYLDPDNVDKWTRRGFIHRQLVETSQVIKIVANILNDRYQQSQTEVLEVPARLGTELRECFGWYKVREVNDYHHVFDAYLAAFIGNYLYRRYPKLQPYFVYGNFAELNKAQLKNIKSFNFLYNITDNKRVVKDIETGQTLWDDQIRQQIQHIYEYKYMLTSHEAFTQHKELYGQTIYPRREFKPGTLKAIKQDQPQELYGGYKNLTAAYMCIVKIQARKRRAAEYRVVRVATESLSALQQAKRLGVQAYERCLRQELVRNNEILRTNADPNSAPREFEVLLDRVLCHQMIISDGQKYLLGSHAYKINCMQLVLSNNSMKILSTSIVKLKQMTNEPLVQVYREILDVVNKYFTLYDVNSFRENLNQFFDKFRTLPITNEYESSKSGKKLIHRGQLETLTLILRGLHANSDKVQYGDQSTLLGGFQTKDGIKLSKDSVIQYTSPAGLNVRTVKLRDLEQKEAQK

SEQ ID NO: 508 - protein, 1361 aa, Lactobacillus pentosus
MNEPYGVGLDIGTNSVGWTVVDMNGRVRKVKGKTALGARLFKEGATAEDRRGFRTTRRRLKRVKWRLRLLREFFDQPISKIDPNFFARRKYSDISPRDPNYNGLAKTLFNDRTDKEFYDDYATIYHLRDKLMTSNRKFDIREIYLAIHHIVKYRGNFLRTGPASQYGSASLHLATSFQKLNDLFAQSEETLNLKLVTDEALLQQIQQILVRTDLSRSEQQRQIWPLMAVLTGASAAEKKRQKNVVVELSKALVGLKAKMNVVTLTEVDAAVVKDWTFTMEESQDKLPEIEEQLSEVGQQIMDEVIQLYASVNLAQLIPAGKRFSQHMVEKYKHHEKNLELLKAYIHSQSDSKRGREIRATYDRYIDGVDSKPVTQEMFYKDLMKYVEADATSNHLAAEIKDEIDSEQFMPKLRTKQNGSIPYQVQQYELDQIISHQKKYYPWLGEENPVAERRGKFPYKLDELVGFRVPYYVGPLITKEDQQATSGAGFAWMVRKADGPITPWNFDQKVDRIASATAFIQRMQTTDTYLIGEDVLPARSLIYQRFMVLNELNNMRVEDRKLAPQQKQRLYNQVFKQHQHVSVKNIQQNLMDAGEYRKTPQITGLADPKGFNSSLSTYHDFKKILLEAIADEHKRADIEKIILWSTTFEDSAIFKQKLEEVAWLTDAQRKQLSGLRYRGWGQLSHKLLTAFKDDKGRSIMDGLWETSDNFMQLRKQPAIETQIKEANQANLTDADIQDTINELYTSPQNKKAIREVMLVLDDIKNAMHGQTPSWIFVEAARGGGVAGRRTQSRSSQIVEAYKGTAKEIVSEKVQHELNEKIKAKADFNTRLVLYFLQNGRDLYTNEAINIDRLSEYDIDHILPQSLVKDDSLDNRVLTSARINREKNDTFASEKFGRKMGAQWRELHRNGLMTQRKLKHLLMRPDEISKHATDFINRQLVETRQVIKLVEELISSEYPAASIVAVKANLTHQFRQTFNFPKLREVNDYHHAFDASLTAFIGMYLLKQYPKLERFFVYGKFAKQPINLTRFNIIRKLAVAEKPIANIETGEILWDKTADIKYFEKLYNYKRLLVTHEVRENYGAMFKQTLFKASYNKSKTLVPKKNHMETSVYGGYSNQETAYLAIVRIPFKSGFKFIVVGIPTRMVAKIKHYQSLGATLNQATHKVIEPKFTKISRKTKQTVISDYEVVLPKVYLDQVVRDQVKGQMYRFSLGSDKEYHNVQELYLPLSIQQAFVGHYDESDDQRSNDLVKVYDAALKQLQRYFPLHLSRNFDQVASQAHQSFEGLKNNVQTSDKQLGKKEVLNSLFVGLHANATRSNLSVLGMSKDFGRIKSNGITLTDQAEIIYQSPTGLFERKVALKDL

SEQ ID NO: 509 - protein, 1358 aa, Lactobacillus pentosus
MNEPYGVGLDIGTNSVGWTVVDMNGRVRKVKGKTALGARLFKEGATAEDRRGFRTTRRRLKRVKWRLRLLREFFDQPISKIDPNFFARRKYSDISPRDPNYNGLAKTLFNDRTDQEFYHDYPTIYHLRDKLMTSDRKFDIREIYLAIHHIVKYRGNFLRTGPASQYGSASLHLATSFQKLNDLFAQSEESLNFKLVTDEAQLQQIQQILVRTDLSRSEQQRQIWPLMVVLMGATAAEKKRQKDFAKELANALVGLKAKLNVVTLTNVDTTVVKDWTFTLEESQDKLPEIEEQLSEVGQQIMDEVIQLYASVNLAQLIPAGKRFSQHMVEKYNHHEKNLELLKAYIHSQSDSKRGREIRATYDRYIDGVKSKPVTQEMFYKDLMKYVEADATSNHLAAEIKDEIDSEQFMPKLRTKQNGSIPYQVQQYELDQIISHQKKYYPWLGEENPVAERRGKFPYKLDELVGFRVPYYVGPLITKEDQQATSGAGFAWMVRKADGPITPWNFDQKVDRIASATAFIQRMQTTDTYLIGEDVLPARSLIYQRFMVLNELNNMRVEDQKLAPRQKQRLYNQVFKQHQHVSVKNIQQNLMDAGEYRETPKITGLADPKGFNSSLSTYHDFKKILPEAIADEHKRADIEKIILWSTTFEDSAIFKQKLEEVAWLTDAQRKQLSGLRYRGWGQLSHKLLTAFKDDNGRSVMDGLWETSDNFMQLRKQPAIETQIKEANQANLTDADIQDTINELYTSPQNKKAIREVMLVLDDIKNAMHGQTPSWIFIEAARGGGVAGRRTQSRSKQIVEAYKSTAKEIVSEKVQHELNEKIKAKADFNTRLVLYFLQNGRDLYTNEAINIDRLSEYDIDHILPQSLVKDDSLDNRVLTSARINREKNDTFASEKFGRKMGAQWRELHRNGLMTQRKLKHLLMRPDEISKHATDFINRQLVETRQVIKLVEELISSEYPSASIVAVKANLTHQFRQTFNFPKLREVNDYHHAFDASLTAFIGMYLLKQYPKLERFFVYGKFAKQPINLTRFNVIRKLAVAEEPIANIETGEILWDKTADIKCFEKLYNYKRLLVTHEVRENYGAMFDQTIFKATDSRKRLIQKKKGFATETYGGYTGRTLAYLAIVKVVTNKDTQYQVVGIPTTMVTQIQQLEASGLTSKQAVTKAIGAMINENNKKLQSYEVLLPKVRFEQVVRDEVKGHIHRFALGTDTYYHNIQELYLPLTIQRAFLGKRNDTDAQTEQNLLTVFETTLAQVNRYFPLYEMNKFKQILNSAQEKFAALPTKNKTVKNKLVTGKDGVLNNLFIGLHANASLGDLKILGMKIGFGKLQVPGGLKLTDQAEIIYQSPTGLFERKVALKDL

SEQ ID NO: 510 - protein, 1358 aa, Lactobacillus plantarum
MKEPYGVGLDIGTNSVGWTVVDASGHVRKIKGQTGIGVRLFKEGAAAADRRGFRTTRRRLKRVKWRLRLLREFFDQPISKVDINFFARRKYSDVSPRDPNYNGLEKTLFNDRSDQDFYHDYPTIYHLREALMTQHRKFDVREIYLAIHHIVKYRGNFLRNDAATAYRSGTLDLQQHFETLNHLFSQADLELNLNLTTDVALLDSIKQTLVRTDISRSDRQKLIMPLLAVLTGATTAEKKRQKAVVTEFAKALVGNKTKIDVLTLTDIDATEAKDWAFSLEENQDKLPGIEDRFSEVGQQIIDEVIRLYASVNLAQLIPEGKRFSQSMVEKYKRHGEDLKLLKAYIRSQSDAKRGRAIRATYDQYIDGVKSKQVTQEAFQKALGKFVDADVDLNSWAAQIKQAIDSEQFMPKLRTKQNGAIPYQVQQNELDQIISNQKEYYPWLGEENPVIKRRGKFPYKLDELFGFRVPYYVGPLITKEMQAATANAGFAWMVRKADGPITPWNFDDKVDRVASATAFIQRMQTTDTYLIGEEVLPARSLIYQRFMVLNELNNIRVDDGQLTPRQKQRLYNQVFKKHKRVTAKNIQDNLVAAREFPTAPRITGLADPKVFNSSLSTYHDLKQVLPEAMSDVRKQADIEKIILWSTIFEDSTIFKQKLTEISWLTAAQLKQLGQLRYRGWGQLLRKLLTGLKDDNNRSIMDGLWETNANFMQLRSQPAIENQIKSANQANLTTADLQDTINELYTSPQNKKAIREVMVVLADIKDAMHGQTPNWIFVEAARGGGVAGRRTQSRSKQIVAAYQGTAQAIVRDQVQRELKEKIKNKANFNTRLVLYFLQNGRDLYTGDAINIDRLSEYDIDHILPQSLVKDDSLDNRVLTNARINREKNDTFASEKFGKKMGAKWKEMHRMGLMTKRKLDHLLMRPDEISKYATGFINRQLVETRQVIKLVEELINAEYPSTAIVSVKANLTHQFRQTFDFPKIREVNDYHHAFDAALTAFIGTYLLKRYPKLERFFVYGKFAKQPVNLTRFNVIRKLAKTDTPITDIDTGEVLWDKLTDIKYFETLYDYKRLLVTREVSENYGAMFDQTLLKASDNGKRLIRKKQSFDTAIYGGYTGKTLAYMAIVKVSTKKDVQYQVVGVPTTMVTQIEQLEQQGMTNKQAVTKVIEPLIAANNKKMLTYEVLLPKVRFEQVVRDRIKGQTHRFALGTDTYYHNIQELYLPLTLQRAFLGKQNESEVQLNQNLLTVFDATLAQVNRYFPLYEMNKFKKILNSARDQIELLEAKNQFVKNKLVLGKQGILTNMFIGLHANASYGDLKVLGVKIDFGKLQVPGGIKLTGDAEIIYQSPTGLFERKIALKDL

SEQ ID NO: 511 - protein, 1361 aa, Lactobacillus rhamnosus
MTKLNQPYGIGLDIGSNSIGFAVVDANSHLLRLKGETAIGARLFREGQSAAERRESRTTRRRLSRTRWRLSFLRDFFAPHITKIDPDFFLRQKYSEISPKDKDRFKYEKRLFNDRTDAEFYEDYPSMYHLRLHLMTHTHKADPREIFLAIHHILKSRGHFLTPGAAKDFNTDKVDLEDIFPALTEAYAQVYPDLELTFDLAKADDFKAKLLDEQATPSDTQKALVNLLLSSDGEKEIVKKRKQVLTEFAKAITGLKTKFNLALGTEVDEADASNWQFSMGQLDDKWSNIETSMTDQGTEIFEQIQEHYRARLLNGIVPAGMSLSQAKVADYGQHKEDLELFKTYLKKLNDHELAKTIRGLYDRYINGDDAKPFLREDFVKALTKEVTAHPNEVSEQLLNRMGQANFMLKQRTKANGAIPVQLQQRELDQIIANQSKYYDWLAKPNPVEKHRASKPYQLDELLTFRIPYYVGPLITPKEQAESRENVFAWMIRKDPSGNITPYNFDEKVDCPASANMFIQRMKNTDTYLIGEDVLPKRSLLYQKYEVLNELNNVSIDGRRLGADQKQRLIREVFERHSSVTIKQVAENLVAHGDFAKRPEIRGLADEKRFLSSLSTYHQLKKILHEAIDDPTKEHDIENIITWSTVFEDAAIFKTELAKISWLDSDTIKALSNIRYRGWGQFSRKLLDGLKLGNGHTVIQELMLSNHNLMQILTDETLKTTMAELNQDKLKADDIEDVINDAYTSPSNKKALRQVLRVVEDIKHAANGQDPSWLYIETADGPGTAGKRTQSRQKQIQTVYANAAQELIDSAVRGELEDKIADKASFTDRLVLYFMQGGRDIYTGAPLNIDQLSHYDIDHILPQSLIKDDSLDNRVLVNATINREKNNVFASTLFASKMAATWRKWHEAGLISGRKLRNLMLRPDEIDKFAHGFVARQLVETRQIIKLTEQIAAAQYPNTKIIAVKAGLSHQLREELDFPKNRDVNHYHHAFDAFLAARIGTYLLKRYPKLAPFFTYGEFAKVDVKKFREFNFIGALTHAKKNIVAKDTGEIVWDKERDIQELDRIYNFKRMLITHEVYFETADLFKQTIYAAKDSKERGGSKQLIPKKQGYPTQVYGGYTRENTAYLAVVKTVEKKADVYRVVRIATSQVAALKEARAQSTVKERELLKKFLTTKFTKIGKNGKKAITPFDIVIPRVPREQLFHNKRYGFFMVNSDTLMHNYQELWMSRSDQQILSKLVKSAKTVENGQVGRLFENIVEQINKYFPLYDINQFRKKLDQSKDIFSKLPLEGNGTTSGKRETIQNILTGAGTGAKNGDLKNLGIKTPFGFLQVPSGIVLDDDTTLIYQSPTGMLNRIVRLSEL

SEQ ID NO: 512 - protein, 1361 aa, Lactobacillus rhamnosus
MTKLNQPYGIGLDIGSNSIGFAVVDANSHLLRLKGETAIGARLFREGQSAAERRESRTTRRRLSRTRWRLSFLRDFFAPHITKIDPDFFLRQKYSEISPKDKDRFKYEKRLFNDRTDAEFYEDYPSMYHLRLHLMTHTHKADPREIFLAIHHILKSRGHFLTPGAAKDFNTDKVDLEDIFPALTEAYAQVYPDLELTFDLAKADDFKAKLLDEQATPSDTQKALVNLLLSSDGEKEIVKKRKQVLTEFAKAITGLKTKFNLALGTEVDEADASNWQFSMGQLDDKWSNIETSMTDQGTEIFEQIQELYRARLLNGIVPAGMSLSQAKVADYGQHKEDLELFKTYLKKLNDHELAKTIRGLYDRYINGDDAKPFLREDFVKALTKEVTAHPNEVSEQLLNRMGQANFMLKQRTKANGAIPVQLQQRELDQIIANQSKYYDWLAKPNPVEKHRASKPYQLDELLTFRIPYYVGPLITPKEQAESRENVFAWMIRKDPSGNITPYNFDEKVDCPASANMFIQRMKNTDTYLIGEDVLPKRSLLYQKYEVLNELNNVSIDGRRLGADQKQRLIREVFERHSSVTIKQVAENLVAHGDFAKRPEIRGLADEKRFLSSLSTYHQLKKILHEAIDDPTKEHDIENIITWSTVFEDAAIFKTELAKISWLDSDTIKALSNIRYRGWGQFSRKLLDGLKLGNGHTVIQELMLSNHNLMQILTDETLKTTMAELNQDKLKADDIEDVINDAYTSPSNKKALRQVLRVVEDIKHAANGQDPSWLYIETADGPGTAGKRTQSRQKQIQTVYANAAQELIDSAVRGELEDKIADKASFTDRLVLYFMQGGRDIYTGAPLNIDQLSHYDIDHILPQSLIKDDSLDNRVLVNATINREKNNVFASTLFASKMAATWRKWHEAGLISGRKLRNLMLRPDEIDKFAHGFVARQLVETRQIIKLTEQIAAAQYPNTKIIAVKAGLSHQLREELDFPKNRDVNHYHHAFDAFLAARIGTYLLKRYPKLAPFFTYGEFAKVDVKKFREFNFIGALTHAKKNIVAKDTGEIVWDKERDIQELDRIYNFKRMLITHEVYFETADLFKQTIYAAKDSKERGGSKQLIPKKQGYPTQVYGGYTRENTAYLAVVKTVEKKADVYRVVRIATSQVAALKEARAQSTVKERELLKKFLTTKFTKIGKNGKKAITPFDIVIPRVPREQLFHNKRYGFFMVNSDTLMHNYQELWMSRSDQQILSKLVKSAKTVENGQVGRLFENIVEQINKYFPLYDINQFRKKLDQSKDIFSKLPLEGNGTTSGKRETIQNILTGAGTGAKNGDLKNLGIKTPFGFLQVPSGIVLDDDTTLIYQSPTGMLNRIVRLSEL

SEQ ID NO: 513 - protein, 1352 aa, Lactobacillus ruminis
MNDNFDLMRVKGKKGIGVRLYNEGQSAAERRMHRTARRRYGRRKWRLRLLEDFFDEHMAEVDDTFFARLKDSNISPKDDKKYRKSLLFPKSKGVTYQDDGEFYKKYPTMYHLRYALMTEHRKFDLREIYLAFHHMVKYRGNFLYDTSVDSFEAKNLDIKGKFDEINDLLSSYTDFYVDNSNAALVESILLEKNTTRKDKSKKIAKLLHVEDKEKGKNKKAKDLATQISNAVLGLKCNFHLIFELQQKYSFDLCSEKTEENIAKLSEVLDENQKMLLMILKEVQDQVMLNAFVPSGMSLSEAMMQKYDDYGEQLKIYHELEHSVSDDSAAKLRGAYRDYNDNIIKRIDGDNKKDTFYKRVKNILTKISKEYVDQDVLESCGKLKKLIDENKLFIRQRTAANGVLPHQLHQIEMRKIIDNQKEYYPWLAEPNPNEKRRVYSKYKVEELIAFRIPYYVGPLVDPNNADKNKEARFSWMVRKKDGEITPWNFYDKVDWAESANNFIERMKSKDTYLLGEDVVPKESMLYQKYEVLNELNNLRINDSGLSDSFEDVKLKQAIYNDLFKKQKIVKITDLQNYLVQNHKYLVKPKISGLADENRFLSSLSTYSDLKTIFGDKVDDRTYFNDFEKMVEYSTVFEDGHDYNQKLDEYTWLTKEEKYKIGKKRYRGWGKLSKKLLTGLRDKNNHTIMDNLWETNRNFMQIQTADEFSKQIAEENERHLKGSVSDAINDMYTSPANKKAIRQVLRVVDDIQKAMGYAPSSISLEFAREDGPSVRTVSRANRMKSIYEKYASEVSEEVMKDLDGVIKDKKGLNDRLYLYFEQQGKDMYSGHPLDFDKVISGQEYDIDHILPQAVIKDDSLDNRVLTTKALNNDVKSKGVPCRMFNGMHSFWKNLYDKGFISRRKFNNLTTNPENIDKYKMKGFVNRQLVETRQIIKLVANVLNDKYQNDDVDIIEVRAELTHDVRKHFKFYKNRNVNDYHHAFDAYLTSFIGHYLFKKYPNLRPLFDYNDFMKVSDNVFKQLRGNNFLGEFLNKTGDIISTDGNFVLNKEEMINKLNKAYAFKKILVTKEVGQRTGAMFNETRYPAPNSRKAALKYRRMPKPDSLISVKDYKNTDIYGGYSGKNDAYMVIVDMGKQYMVVGVPVRYTEKLDKLRIKHSELYRDELRKVLSRDKTLLDSKGNVKRFDIVLDRVLYGQLIEDGNELFTLGSSKYKRNFRQLFLDKQCIEILDSSATPQPTDEELIWVYDQILDKVDKYFELYDINRQRETLRKGRAAFCSLPNISMKKDDVTKKKILNEILVALHANESESNCEKIGKKVFGRLQVPGGIKLSKEAKLIYQSPTGLFERVVYLKDL

SEQ ID NO: 514 - protein, 1339 aa, Lactobacillus salivarius
MERYHIGLDIGTSSIGWAVIGDDFKIKKKKGKNLIGTRLFNEGATAAERRGFRTQRRRLNRRKWRLKLLEEIFDPYMAEVDEYFFARLKSSNLSPKDSNKKYLGSLLFPDKSDSNFYDKYPTIYHLRRDLMEKDEKFDLREIYLAIHHIVKYRGNFLEKVPAKNYKNSGASIGFLLEEVNSLYKDIIGDESIAILNSEKFEDVEKIILDEETRNLDKQKSVGKLLVEDKKKKNIVTAFSKAIFGYKFNIEDLLLIENDEKNKLTFNDENIDDIFNELSHSLDDKQMDLLTKTREIYFKFKLNMIVPTGYTLSESMIEKYEMHKAHLKMYKEFINTLNTKDRKILKNAYSDYINTEKAKAANAQENFYKTVKKIIKDNNSDTAKKIIVLIDEGNFMPKQRTGENGVIPHQLHQIELDRIIENQAKYYPWLAEANPVEKNRKFAKYKLDELVTFRVPYYVGPLIDKTESNKNEKETKFAWMVRKAKGTITPWNFENLVDRTESANRFIKRMTSKDTYIIGEDVLPASSLLYEKFKVLNELNNIKVNEKKLDIEQKQDIYLNLFTTAKNVTKKSLATYLNCSADSISGLSDGEKFNSSLSSYIDLKAILGNIVDDCNKNEDLEKIIEYSTVFEDGNIYKEKLSEISWLTDEQIEKLSNIHFKGWGRLSKKLLTQITNENGERIIDALWNTSNNFMQIINDESIQAKLAEINGKYAGKSDLEDILSEAYTSPQNKKAIRQVMKVVEDIEKAMQCEPTSISIEFTRKKQKSRLTNTRYKKISDVYEKIADEVISEYELRKLQSELDSNANNMRDRYYLYFMQLGRDMYTGEKINIDELHQRYDIDHILPQSFIKDDSINNRVLTRKDVNNKEKSDKTAADLYAVEMSDFWRKLRKQGLITEQKYKNLLTKSDSIDKYAKKGFIKRQLVETSQVVKLVANILQDKYSDTKIIEVRAKLNSNLREEYKLIKNRAVNDYHHAIDGYLTTFIGQYLYKTYPKLRSYFVYNDFKKLDSNYLKHMKKFNFLWQLQDDKTIDIYDNVNNKFVLNVPEMKKYIQKIYNYKYMLVSKEVTTKNGAFYDQTKYNAKTVNLIPIKKNKPTNIYGGYKGKVSSYMMLVKIRKKKEVIYKFVGVPRLWTDELDRLKDTTERKILLNEIAKNSLSKTEQDFEVILDKVYYGQLIIDGNQKYTLGSSEYKYNAMQLHLSKHALEVLAKENVKDAEITDKDLVSVYEEILSVVNKYFELYDINKFRQKLNEGLEIFRKLPVYNVYESNKIKQVGKFEVLNRILMGLHANAMITDLKVLGIKTKLGQMQVNGGIKLSPDAKLIYQSPTGIFSRAVRVKDLG

SEQ ID NO: 515 - protein, 629 aa, Lactobacillus salivarius
MERYHIGLDIGTSSIGWAVTGDDFKIKRKKGKNLIGTRLFKEGNTAAERRGFRTQRRRLNRRKWRLKLLEEIFDPYMAEVDEYFFARLKDSNLSPKDSNKKYLGSLLFPDISDSNFYDKYPTIYHLRRDLMEKDEKFDLREIYLAIHHIVKYRGNFLENVPAKNYKNSGASIGFLLEEVNNLYKDIVGDENVTILNSEKFEDVEKIILDDGIRNLDKQKGVGKLLVEDKKNKNLVTAFSKAIFGYKFNIEDLLLVEGDEKSKLTFNDENIDDIFNELSHSLDDRRMDLLTKTREIYFKFKLNMIVPTGYTLSESMIEKYEIHKAHLKMYKEFINTLNSKDRKILKNAYTDYINNEKAKAANAQENFYKTVKKTIKDNDSDIVKKIIDLIDEGNFMPKQRTGENGVIPHQLHQIELDRIIENQAKYYPWLAEENPVEKNRKFAKYKLDELVTFRVPYYVGPLVDKTESNKNEKETKFAWMVRKSKGTITPWNFENLVDRTESANRFIKRMTSKDTYIIGEDVLPASSLLYEKFKVLNELNNIKVNEKKLDIEQKQNIYLKLFTTTKNVTKKNLATFLNCSIESISGLSDDKKFNSSLSSYIDLKVILGDIVDDYSKNEDLEKIIEYSTIF

SEQ ID NO: 516 - protein, 897 aa, Lactobacillus salivarius
  misc_feature (822)..(822): Xaa can be any naturally occurring amino acid
MLIESDEKNKLTFNDENIDDIFNELSHSLDDNQMDLLTKTREIYFKFKLNMIVPTGYTLSESMIEKYEMHKAHLKMYKEFINTLNAKDRKILKNAYSDYINNEKAKAANAQENFYKTIKKTIKDNNSDTAKKIIGLIDEGNFMPKQRTGENGVIPHQLHQIELDRIIENQAKYYPWLAEENPVEKNRKFAKYKLDELVTFRVPYYVGPLVDKTESNKNEKETKFAWMVRKAKGTITPWNFENLVDRTESANRFIKRMTSKDTYIIGEDVLPASSLLYEKFKVLNELNNIKVNKKKLDVEQKQHVYLDLFTTRKNVTKDNLATSLNCDVESITGLSDNEKFNSSLSSYIDLKAILGNAVDDCNKNKDLEKIIEYSTIFEDGNIYKEKLSEISWLTDEQIEKLSNIHFKGWGRLSKKLLTQITNENGERIIDALWNTSNNFIQIISDESIQAKLAEINGEYADKSNLEDILDEAYTSPQNKKAIRQVMKVVEDIEKAMKCKPTSIAIEFTRRKGKSKLTNTRYKKISETYEKITDELISEYELGKLQSKLDSKANNMRDIYYLYFMQLGRDMYTGEKINIDELHQYYDIDHIFPRSFIKDNSLNNRVLTRKEINNNEKADRTAADLYAVKMGDFWRKLRKQGLITEKKYKNLLTRTDSIDKYTKQSFIKRQLVETSQVVKMAANILQDKYSNTKIIEVRARLNSDLRKEYELIKNREVNDYHHAIDGYLTIFIGQYLYKTYPKLRSYFVYDDFKKLDSNYLKHMDKFNFIWKLEDKKAEDVYDNVNNEFILNVPKMKDYIQKIYNYKYMLISKEVTTESGAFYXZTKYNAKTINLIPIKKDKPTNIYGGYKGKVSSYMMLVKIQKKKEVIYKFVGVPRLWTDELDRLIDTDEKKALLKK

SEQ ID NO: 517 - protein, 1419 aa, Lactobacillus sp.
MAKPQNYTIGLDIGTNSVGWTVTDDQNNILRIKSKKAIGARLFEEGKVAAERRSFRTTRRRLSRRKWRIKLLEELFDEEISKVDPNFFARSHESWISPKDKRERYSAIVFPTPEEDKKFHNEYPTIYHLRDRLMKDDQKHDIREIYVAIHHIMKYRGNFLHDESIETYRSGMSSLGGGDERTILNTKILDDLNDAFADNLATQGISVNSASADQINEIVTSGHLNVDSQKAIAKLLLPTTLSSDDKKQDKKIKKLATDAAKNVASAWLGYKANFAAILNIQEVDKDKKKIYSFALQGADEEDKVETLESVLSQDQIEIVDRIIRIRHAIVLGEIIPVGMTLSEAMIEKYDQHAKDLKNLKTVIRNLKDRKNAVKLQAIYDLYVNNRHADTAKAMKLAGVKKRTELLEPEEFNKSIEKLLDDSPVSAEIKKRIAEKDFLPLQRSNSNGVIPNQLHQIELDEIIKKQSKYYPFLGETNEHASADVARKAPTKLDQLLTFRVPYYVGPLITKEEQEEQDGHSFAWMIRKNPKDHEKITPWNFDEKVDRMASATQFIKRMTTKDTYLLGEDVLPSSSLKYQLFTVLNELNNLRINHKKLTREEKEQVIEDLFKKYKTVKADKFKNYWQKGHAGLDVKIQGMADPEKFNSTMSTYIDLQKIFGDQLDDAQRQNDFEKIIEYSTIFEDRKILGEKLRADFVWLSEDQIKRLCRLRLQGWGRLSLKLLTRLTDADGQNVLERLLNSNDNFMQIVKDPVIKAKIEQKNQKLLRADWSENATESILDEAYTSPQNKKAIRQVMRVVHDIVKACDGNLPAKFAIEFARSQDDDPKRTVARADRLQKIYAQISDEVVSQGVKDQLSGMKSLKDRYYLYFMQGGRDAYTGKPLNIDRLSDYDIDHIMPQSFIKDDSLDNRVLVTRAVNNQKSDNVPVLLYGNHLVADLGITIREMWDRWQKSGMISKRKLANLLTDPATLSEYRAEGFINRQLVETSQVIKLTATILQSEFPDSKIIEVPAKYNSILRKQFDLYKSREVNDYHHAIDAYLSTIVGNYLYQVYPNLRRLFVYGEFKKFSHGEEESSHQAVRRVKSMNFLDDLLRGKHGDDIYCRVTGEVIFSRKDIISKLKQAYSFKQMLVTQEVFTKKSALFDQTVYPSPARDSKTRSGLIPRKQGMDTEIYGGYSGNKDAYFVLAQVVKSKGHTLQVVGVPIRALRALANCSNYSEQLLKIVKAQVLFNKKTGKAKKGISDVRILLDKIPYRQPVLDGSAFYMLGSSTYKYNLKQISLSQQSMKYILDYIDDPNFNKHEMTKIDQQNEKECLLSVYDEILDKMDKYLSLYDINGFRKKLHVGRDKFIKLEVEKQAEAIKNVLRGFHANSDMTKLSDLGLSTSLGFMQASDGIKLSDNAVFIYQSPTGLFERRVKVSDLLK

SEQ ID NO: 518 - protein, 1289 aa, Lactobacillus versmoldensis
MRRRYRRRRNRLNWLDELFADELAKIDPSFLLRMKNSWVSKKESTRKRDPYNLFIDEKYNDVDYFNQYPTIFHLRKELITEDKKVDIRLIYLAIHNIIKYRGNFTLENQNFDISQLSSNFSQQISDFFALFSDFGVIMPEDFDPDKISDILLNPNLSPSGKVSEAIATISPKTNVKAKIKIILLLLVGNNGDLKKLFDLETTEKIAVKLSSRHIDSELPIILSELNEQQENIITIANSIFGSIILKDFLGDETSISAAKVISFEDHKQDLQKLKTMWRETSNKEAVKAGKKAYEDYIGHEDSETFYKKIKKFLEKAQPVDLANKALAEIELENYLPKQRNRNNTVIPYQLNENELIAILDHQEKYYPFLKENRDKILSLLTFRIPYYVGPLQDSNNNRFSWMTRKASGAIRPWNFSEKVNVEQSSNDFIKRMRSTDTYLIGEPVLPKKSLIYQCYEVLSELNNTRVKDGSSNPKRLDVTIKQRIYNEIFKNQKSVSVKVLQNWLIKESYFKSPEISGLADKKKYLSSLSTYIDFKKIFGQRFVDDPVNSPQLEELAEWLTLFEDKKILLIKLQNSKYSYDQATINKLSTMRYQGTGKLSKKLLVDLKTTKKSIGKSGAESLSILDLMWSTKDNFMQIIHDADYTFEQQIKEFNYDTEDELTPLEKVANLHGSPALKRGLNQSIKVVADIVKFMGHDPEKIFIEFTRSDDFSKLTISRYRRIKKQYLEIAKAIKKIPAEFKDIKEYQTQLEENKGKLASERLMLYFLQCGHSLYSNKPIDLNMINSSKYHVDHILPQSYIKDDSLENKALVLASENENKIDNMLISHDIIATNLPRWQALKDQNLMGSKKFADLTRTTVTENQKKGFIQRQLVQTSQIVKNITLILNDLYKNTSCIETRATLSSEFRKAFSNFDETTYHYQFPEFVKNRDVNDFHHAQDAFLACVIGEYQLKKYPKDNLRLVYDQYSKFLDSLKKDTRKKNGRMPRYTQNGFIIGSMFNGKTYVDDNGEIIWDQKIKESIRKTFNYHQFNVVRQTIEQHGKLFNDTIQPHSDRYKLIPLKTNRDPAIYGGYNNDNNAYSVVLDVDGKKKINGIPIRIANQLKSDELDLSSWLENNIKHKKPMTILIDKVPKYQRIINEETGDLLITSANEVINNVQLFLPSMYTALISLLDSTKTEMYSKLLSNYEANILIDIYDYLLTKLKNNYPLYRKEWAKLAEHRDDFIESDLVTQASTLQQLIKFMHADPSNVNLKFGNFKGNRFGRKNGNIKLSKTDFIYESPTGLFKSIKHID

SEQ ID NO: 519 - protein, 1372 aa, Legionella pneumophila
MESSQILSPIGIDLGGKFTGVCLSHLEAFAELPNHANTKYSVILIDHNNFQLSQAQRRATRHRVRNKKRNQFVKRVALQLFQHILSRDLNAKEETALCHYLNNRGYTYVDTDLDEYIKDETTINLLKELLPSESEHNFIDWFLQKMQSSEFRKILVSKVEEKKDDKELKNAVKNIKNFITGFEKNSVEGHRHRKVYFENIKSDITKDNQLDSIKKKIPSVCLSNLLGHLSNLQWKNLHRYLAKNPKQFDEQTFGNEFLRMLKNFRHLKGSQESLAVRNLIQQLEQSQDYISILEKTPPEITIPPYEARTNTGMEKDQSLLLNPEKLNNLYPNWRNLIPGIIDAHPFLEKDLEHTKLRDRKRIISPSKQDEKRDSYILQRYLDLNKKIDKFKIKKQLSFLGQGKQLPANLIETQKEMETHFNSSLVSVLIQIASAYNKEREDAAQGIWFDNAFSLCELSNINPPRKQKILPLLVGAILSEDFINNKDKWAKFKNFWNTHKIGRTSLKSKCKEIEEARKNSGNAFKIDYEEALNHPEHSNNKALIKIIQTIPDIIQAIQSHLGHNDSQALIYHNPFSLSQLYTILETKRDGFHKNCVAVTCENYWRSQKTEIDPEISYASRLPADSVRPFDGVLARMMQRLAYEIAMAKWEQIKHIPDNSSLLIPIYLEQNRFEFEESFKKIKGGSSDKTLEQAIEKQNIQWEEKFQRIINASMNICPYKGASIGGQGEIDHIYPRSLSKKHFGVIFNSEANLIYCSSQGNREKKEEHYLLEHLSPLYLKHQFGTDNVSDIKNFISQNVANIKKYISFHLLTPEQQKAARHALFLDYDDEAFKTITKFLMSQQKARVNGTQKFLGKQIMEFLSTLADSKQLQLEFSIKQITAEEVHDHRELLSKQEPKLVKSRQQSFPSHAIDATLTMSIGLKEFPQFSQELDNSWFINHLMPDEVHLNPVRSKEKYNKPNISSTPLFKDSLYAERFIPVWVKGETFAIGFSEKDLFEIKPSNKEKLFTLLKTYSTKNPGESLQELQAKSKAKWLYFPINKTLALEFLHHYFHKEIVTPDDTTVCHFINSLRYYTKKESITVKILKEPMPVLSVKFESSKKNVLGSFKHTIALPATKDWERLFNHPNFLALKANPAPNPKEFNEFIRKYFLSDNNPNSDIPNNGHNIKPQKHKAVRKVFSLPVIPGNAGTMMRIRRKDNKGQPLYQLQTIDDTPSMGIQINEDRLVKQEVLMDAYKTRNLSTIDGINNSEGQAYATFDNWLTLPVSTFKPEIIKLEMKPHSKTRRYIRITQSLADFIKTIDEALMIKPSDSIDDPLNMPNEIVCKNKLFGNELKPRDGKMKIVSTGKIVTYEFESDSTPQWIQTLYVTQLKKQP

SEQ ID NO: 520 - protein, 907 aa, Leptospira inadai
MAKSIEEIRSIQNEFVVEYSILLKKIKKGEIDKKNDVYKVYQNTIKSSERLEQVLKERLGFQNVSKSYFNNPYSIAQLYNLISVDRSGFSKVCRSCQEENHWRSTLIDTDRGPQAQASKQVSDTGRPFDGQLAMLLDRIAFEIVKLKRIEIERLLSNKNSSKIEVVEIPLLIEENSFNFRYELAELKKLSKKKKDQLKKSVEEFDTKLNSKQERIKAASRELCPYTGKKISKGEIDHILPRSWTQKQFGTALNAEANLIYASREGNQSKGNREYGLNDLDEKYLNIIFGTKEVDSIQRNISDTIDRLDIERGTTRIVFDRLAPNERDCLRHALFIKSLRPKVFELLSGQLKARVNGTQLYLAKRIRSLLLKNQDFITKSLIIKVPSFSFYEPRTVDLPYMRKELAEKFPNLGKQNPQPTGSHIIDAAMVMAYAVETDSGNLSFGSKDKSEGFDSESLSRFLPSNIQFLSIKSKDKTDSKYPYKKPLFKDGVFGERFLPILIAEKGLRVGYTLENSLEVNSENPEEFFNVLKPYLLFKRKPIESNYQTLVAFAQKDKRGYIVLPVNKPKALESISQRKSDPHTSILKNILYTVSRESIPSLIFDKNTLIPEIKSNKVNWGDKLEKKFRIKIEIKLYGKKIADGFIRYPGKTEWEKLLLTEPLKGLVKNKTLTPKWFDSLENLAGLDDHFKDTSNPEAKHKRKSNHYALPVPKGPSGGFRIRRNSFDGYKVYQLYSVDGNSFHAFKIENGWTGKTLLLDIYQNSGNLHSLDYDYENTDISQTALFSKFYKIEFSKEETQKINSKGIKSLYVAPGSSSRQYIRVIFDKQTFSKFIKFQSKFWEFDLITPLPKDKAKDLIESILKIFPEDLRPKKPRNDIHIQNISHDSVQVEYIADGKTQGFGQYFINQN

SEQ ID NO: 521 - protein, 418 aa, Leptospira inadai
MILKSPIAIDLGAKNTGIVYTTYQPNALPTEIHGATIISDNLKLSQVDRRAKRHQRRNYTRMKLARRLVYLIIRYHYRIPEQDLTPEVKTSLQSLLTRRGYTFQSIETEGNELGQAPWGEIEDYFPNVQDYEKSLPIQTVLYHFFSSENLELNKLVPSKEPETKEDKNILKYIREQKEAFESEQNNGARHRLKYFEEIKEDFPRKIKLMECLQKNKIEEKKFLNLIQNISNLQIKPLRAYFNDKDMKEKEIWEPRRLHTYIARWIRSWHIDPKNSSKRLIRQKLLSQLENGKLKIIRDTSIYSPSKDIISFLEEIDPKDTIPPYEDQNNRHPPRCQNLWLDGKILDRYFPGWEQSLWKLIRNEKNNPFEQLITKDFRTDDTISEGKSLSEQIQIYERSHSNIKLDVRAVILQRFLDRS

SEQ ID NO: 522 - protein, 125 aa, Leptospira inadai
MSAYDRSANLDPWSLRLQGKAKKEIKTTESLSKTDLQKASDAYEKIKEILSESDTDQFIKLANRYYLEVADIKKGMWLPTAPERKHKEIPKSIAHEENQDISLFHKCNTKTGSKKRISQVSLEMF

SEQ ID NO: 523 - protein, 1355 aa, Leuconostoc gelidum
MTYSIGLDIGTGSVGWAVIGDDYRLKRAKGKNLIGVRLFDSATTAAERRGYRTTRRRLSRRHWRLRLLNDIFASDLAEQDENFLPRLKYSWVNPDDEQNPQLNSDVANGALFGSSETDKAFHKNYPTIYHLRHELMTDTAKHDLREVYLAIHHIVKYRGNFLNTADKINAENSFNVDLFIAALDEYNEFLETPITSIKDAQLFSDKLTDINARNKSVRVENAMSETYDDKSKIFKAILTALVGNTANFQTIFDLSDLEKDEAKNFKFKLDLEDVETKLDVVRAKLSDEQNAFLEAVLIAYDGITLKMILGDYKSISQSMIESYKSHQRDWKYIKNNVRLNEQKIEPDKNSVKFFKLDPKKLIYPSNLAYLQVISSNEDEHRKGLDYFKTAIQDADILQRIENDTFLPRQRTKRNGVLPYQLHLAELEQIIKKQSKYYPFLANIYTQDNKTENKLIGLLKFRVPYYVGPLVEAEKVTGDGKNHWLIKKELQENTPITPFNFDDVVDKDKSGEQFIKRITGTDSYLIGEPTLPENSLLYQKYNVLQELNNVRNERHQRLPIKVKQDIFEHVFKIDKNVNAKKVMAYLKLNGYGDFQIAGLSDTRTGKFNSNLSSYNYFVDLLGREKTEKIREDRLEEIIEIQTVFEDKILVAKRLSNLDFLTPQEKSKLSAKHYTGWGRLSQKLLTTQFIKTALSEAGDIIPQSHSIIDLLYYTDKNLMEILNDKTFNVRNWLTEQNKGTESGNSLYDQIDALAGPKDIKRGITQVFSIIDDIKKAMGSNPETVYLEFARETQTSRLTNSRLNRVQEIYNSPELKTEFAYLAKKLEAETKESIHDDRLYLYYLQEGRDMYTGKEIPFDQISSNYDIDHIIPQAFTKDDSLDNRVLVNRATNARKSNSPTFTNDIIDNRKSWWQSLVKRGLMSKEKFERLTDKRKTFSENQTNHFIARQLVETRQIIKNVADLIKNNYDGTQAVAIRASLTGEMRRYLDWPKNRDMNDYHHAHDALMMATVGKYVDRRGFFDNGSVSDGAGNAYNLYTKDWLVAARVGTRNDSQRVNPYGFIVGSMNSKAVRQQVNKETGEIVWGNENLDYLRHVLSYKKILVTRRLSGSSGRLYAETLFSPNPKAKLIAQKANRSVALYGGFTKAESAYTALVEFNKKGDRSYKLIKVPMAIANRVNDKQITVTAYIASLNLRDFSRVVLEHLPLGTLIRESDGSEFYAASSEYKHNAKELWAPKEILRSSKKLDKATADNLIDIFDFLTNDKTISNFKFYEKDLLHLKNVRDKFVEASDEIKIKVLSDVIYELHNDAGWRDPFKHIQEKPAWTMLQVKGGIKLSEKAAIVYQSPTGLFETITIVGE

SEQ ID NO: 524 - protein, 883 aa, Leuconostoc pseudomesenteroides
MIGVRLFEGADTAAERRGYRTTRRRLSRRRWRLRLLNDIFASELSKIDENFLPRLKYSWVNKNDTDNVHFGVGVFDNSEQEKAFYQDYPTIYHLRQKLMTDNRQHDLREVYLAIHHIVKYRGHFLNSGEISANSSFDAQKFLELLREFDNTFYPDAVKFLNLDQLDLPDKISSEISDSKISKSERVDRVLQHVQLANSGAKKILKAILNAVVGNSVDSVAMFSLSDLDKEEKKKINHPVTDSKPFKYSDKEVEAKLDELSNLLQDEQKIEFLSLLKLSFDGLTLKMLLGNAKSVSEAMVERYKVHKDDLKFIKENILNSFSKDKKKEFDKYYEAHLAEKDVDNVDKYFKKIIDDSIISKDKKIELLQKIDDHDFLPSQRSKINGAIPHQLHRNELDKIISQQSKYYPFLADSYTQNGKTETKLAGLVNFRVPYYVGPLVSKENADRNNPDGGQNHWVEFKENTSLSNLTPWNFNEIVDKDKSAAKFIERLTGMDTYLIGEPTLPQNSLLYQKYNVLQELNNIRVDNHKLDVKIKQDVFEHLFKTQNSVSAKDVKNYLIANGYAAPSIQITGLSDTNEKTFNSKLSSYNYLVDKLGRTFVESVKSDVLEKIIELQTVFEDKTVLLRQLSMISELTLAQANQLAEKHWTGWGRLSRKLLSSKVVDVNKITNSTFYPATSRQTIIDTLYHTQLNLMEIINNAEDLYGVRQWISEQNKSDSSDTNDVYDQIQELAGDKKIKRGITQSFRILDDIVKAMGGEPERVYLEFARENQQSGVSFSRKNLLSKLYENDSLKQTFKELKSQLESETKENLQNDRLYLYYLQQGRDMYSNDELNIDQLSSYDIDHIIPQAYTKDNSFDNRVLVSSKANRLKRMLLWYPVKLSKK

SEQ ID NO: 525 - protein, 468 aa, Leuconostoc pseudomesenteroides
MKDQGFISKRKFENLTRRGDFSEQQKERFIARALVETRQIIVNVSSLIDSHFNHTKAVAVKSNMTTDMRHYTKVPKNRDINDYHHAHDALFVATVGQYIENKGFMKAGKLSDSVGNEYNRYTKKWIETARKNTNYGRVNPFGFVVGSMQTATRGKLDYETGELKVVKNNYWSKDDLDYLLKVVSYKKILVTTKLQDNKGAMYDANLISAKGSGKKKAQLQISKSKNIDLYGGFNKLQNEYSVLILNHDEYRWLSIPMYARNSSEQYLHDKYPDAKVILNHILVGQPILLSNSSDPQKSKFASLRIATGGDYHNNFEFVPSVDVKKILDNIYLNHSVTDDEYKKVFESLLATLHDKFVFGIHQVMYNKIFDNKYLFDKMPDEAKRNVINSLLKFMNISKNQLGAVGKIGGKVNGVLYGFKTETEKGTSAGQLISNGKMQPHDIFIFQSPTGIFERRVTVAELANVIKDE

SEQ ID NO: 526 - protein, 1103 aa, Listeria innocua
LKLYPGEKSTGMFAQFISLIVGSKGNFQKPFDLIEKSDIECAKDSYEEDLESLLALIGDEYAELFVAAKNAYSAVVLSSIITVAETETNAKLSASMIERFDTHEEDLGELKAFIKLHLPKHYEEIFSNTEKHGYAGYIDGKTKQADFYKYMKTTLENIEGADYFIAKIEKENFLRKQRTFDNGAIPHQLHLEELEAILHQQAKYYPFLKENYDKIKSLVTFRIPYFVGPLANGQSEFAWLTRKADGEIRPWNIEEKVDFGKSAVDFIEKMTNKDTYLPKENVLPKHSLCYQKYLVYNELTKVRYINDQGKTSYFSGQEKEQIFNDLFKQKRKVKKKDLELFLRNMSHVESPTIEGLEDSFNSSYSTYHDLLKVGIKQEILDNPVNTEMLENIVKILTVFEDKRMIKEQLQQFSDVLDGVVLKKLERRHYTGWGRLSAKLLMGIRDKQSHLTILDYLMNDDGLNRNLMQLINDSNLSFKSIIEKEQVTTADKDIQSIVADLAGSPAIKKGILQSLKIVDELVSVMGYPPQTIVVEMARENQTTGKGKNNSRPRYKSLEKAIKEFGSQILKEHPTDNQELKNNRLYLYYLQNGKDMYTGQDLDIHNLSNYDIDHIVPQSFITDNSIDNLVLTSSAGNREKGNDVPPLEIVQKRKVFWEKLYQGNLMSKRKFDYLTKAERGGLTEADKARFIHRQLVETRQITKNVANILHQRFNYGKDDHGNTMKQVRIVTLKSALVSQFRKQFQLYKVRGVNDYHHAHDAYLNGVVANTLLKVYPQLEPEFVYGDYHQFDWFKANKATAKKQFYTNIMLFFAQKDRIIDENGEILWDKKYLDTVKKVMSYRQMNIVKKTEIQKGEFSKATIKPKGNSSKLIPRKTNWDPMKYGGLDSPNMAYAVVIEYAKGKNKLVFEKKIIRVTIMERKAFEKDEKAFLEEQGYRQPKVLAKLPKYTLYECEEGRRRMLASANEAQKGNQQVLPNHLVTLLHHAANCEVSDGKSLDYIESNREMFAELLAHVSEFAKRYTLAEANLNKINQLFEQNKEGDIKAIAQSFVDLMAFNAMGAPASFKFFETTIERKRYNNLKELLNSTIIYQSITGLYESRKRLDD

SEQ ID NO: 527 - protein, 1337 aa, Listeria innocua
MKNMKKPYTIGLDIGTNSVGWAVLTDQYDLVKRKMKIAGDSEKKQIKKNFWGVRLFDEGQTAADRRMARTARRRIERRRNRISYLQGIFAEEMSKTDANFFCRLSDSFYVDNEKRNSRHPFFATIEEEVEYHKNYPTIYHLREELVNSSEKADLRLVYLALAHIIKYRGNFLIEGALDTQNTSVDGIYKQFIQTYNQVFASGIEDGSLKKLEDNKDVAKILVEKVTRKEKLERILKLYPGEKSAGMFAQFISLIVGSKGNFQKPFDLIEKSDIECAKDSYEEDLESLLALIGDEYAELFVAAKNAYSAVVLSSIITVAETETNAKLSASMIERFDTHEEDLGELKAFIKLHLPKHYEEIFSNTEKHGYAGYIDGKTKQADFYKYMKMTLENIEGADYFIAKIEKENFLRKQRTFDNGAIPHQLHLEELEAILHQQAKYYPFLKENYDKIKSLVTFRIPYFVGPLANGQSEFAWLTRKADGEIRPWNIEEKVDFGKSAVDFIEKMTNKDTYLPKENVLPKHSLCYQKYLVYNELTKVRYINDQGKTSYFSGQEKEQIFNDLFKQKRKVKKKDLELFLRNMSHVESPTIEGLEDSFNSSYSTYHDLLKVGIKQEILDNPVNTEMLENIVKILTVFEDKRMIKEQLQQFSDVLDGVVLKKLERRHYTGWGRLSAKLLMGIRDKQSHLTILDYLMNDDGLNRNLMQLINDSNLSFKSIIEKEQVTTADKDIQSIVADLAGSPAIKKGILQSLKIVDELVSVMGYPPQTIVVEMARENQTTGKGKNNSRPRYKSLEKAIKEFGSQILKEHPTDNQELRNNRLYLYYLQNGKDMYTGQDLDIHNLSNYDIDHIVPQSFITDNSIDNLVLTSSAGNREKGDDVPPLEIVRKRKVFWEKLYQGNLMSKRKFDYLTKAERGGLTEADKARFIHRQLVETRQITKNVANILHQRFNYEKDDHGNTMKQVRIVTLKSALVSQFRKQFQLYKVRDVNDYHHAHDAYLNGVVANTLLKVYPQLEPEFVYGDYHQFDWFKANKATAKKQFYTNIMLFFAQKDRIIDENGEILWDKKYLDTVKKVMSYRQMNIVKKTEIQKGEFSKATIKPKGNSSKLISRKTNWDPMKYGGLDSPNMAYAVVIEYAKGKNKLVFEKKIIRVTIMERKAFEKDEKAFLEEQGYRQPKVLAKLPKYTLYECEEGRRRMLASANEAQKGNQQVLPNHLVTLLHHVANCEVSDGKSLDYIESNREMFAELLAHVSEFAKRYTLAEANLNKINQLFEQNKEGDIKAIAQSFVDLMAFNAMGAPASFKFFETTIERKRYNNLKELLNSTIIYQSITGLYESRKRLDD

SEQ ID NO: 528 - protein, 953 aa, Listeria ivanovii
MKKMLANIDGADYFIDQIEEENFLRKQRTFDNGTIPHQLHLEELEAILHQQAKYYPFLRKDYEKIRSLVTFRIPYFIGPLANGQSDFAWLTRKADGEIRPWNIEEKVDFGKSAIDFIEKMTNKDTYLPKENVLPKHSLCYQKYMVYNELTKIRYIDDQGKTHHFSGQEKQQIFNGLFKQQRKVKKKDLERFLYTINHIESPTIEGVEDAFNSSFATYHDLQKGGVTQEILDNPLNADMLEEIVKILTVFEDKRMIKEQLQSFSDVLDGTILKKLERRHYTGWGRLSAKLLTGIRDKHSHLTILDYLMNDDGLNRNLMQLINDSNLSFKSIIEKEQVSTADKGIQSIVAELAGSPAIKKGILQSLKIVDELVGIMGYPPQTIVVEMARENQTTGKGKNNSKPRFISLEKAIKEFGSQILKEHPTDNQCLKNDRLYLYYLQNGKDMYTGKELDIHNLSNYDIDHIIPQSFITDNSIDNRVLVSSTANREKGDNVPLLEVVRKRKAFWEKLYQAKLMSKRKFDYLTKAERGGLTEADKANFIQRQLVETRQITKNVANILYQRFNCKQDENGNEVEQVRIVTLKSTLVSQFRKQFQLYKVREVNDYHHAHDAYLNGVVANTLLKVYPQLEPEFVYGDYHQFDWFKANKATAKKQFYTNIMRFFAKENQIIDKNGEILWDNRYLDTIKKVLSYRQMNIVKKTEIQKGEFSNATVNPKGNSSKLISRKADWNPIKYGGFDGSNMAYSIVIEYEKRKKKTVIKKELIQINIMERVAFEKDQKAFLEEKGYYSPKVLTKIPKYTLYECENGRRRMLGSANEAQKGNQMVLPNHLMTLLYHAKNCEANDGESLAYIEMHREMFAELLAYISEFAKRYTLANDRLEKINMFFEQNKKGDIKVIAKSFDKLKVFNAFGAPRDFEFFETTIKRKRYYNIKELLNATIIYQSITGLYEARKRLED

SEQ ID NO: 529 - protein, 232 aa, Listeria ivanovii
MMSKLILGLDIGISSVGWGVLDESTNEVVDAGVRLFEEATRNGNEDRRGFRSARRLKRRRQHRLERAKGLIENNGFSCTDINKFNPYQARYNAIFGEVTKDELAAALFHLVKRRGTTIDAPEEEVKDVENELSTKMQLEKNAKKLATKYDYICEIQLEKLKENKVVRDHENRFRTEDYVKEARAILENQQEYYPEVTNEFIESYMALIETRRMYYDGPGSEKSPTPYGQYFI

SEQ ID NO: 530 - protein, 300 aa, Listeria monocytogenes
DDGLNRNLMQLINDSNLSFKSIIEKEQVSTTDKDLQSIVADLAGSPAIKKGILQSLKIVDELVSIMGYPPQTIVVEMARENQTTVKGKNNSRPRYKSLEKAIKEFGSQILKEHPTDNQELRNNRLYLYYLQNGKDMYTGQELDIHNLSNYDIDHIVPQSFITDNSIDNLVLTSSAGNREKGDDVPPLEIVRKRKVFWEKLFQGNLMSKRKFDYLTKAERGGLTEADKATFIHRQLVETRQITKNVANILHQRFNNETDNHGNNMEQVRIVMLKSALVSQFRKQFQLYKVREVNDYHHAHD

SEQ ID NO: 531 - protein, 782 aa, Listeria monocytogenes
  misc_feature (722)..(722): Xaa can be any naturally occurring amino acid
IFNDLFKQKRKVKKKDLELFLRNINQIESPTIEGLEDSFNASYATYHDLLKVGMKQEILDNPLNTEMLEDIVKILTVFEDKRMIKEQLQQFSDVLDGVVLKKLERRHYTGWGRLSAKLLVGIRDKQSHLTILEYLMNDDGLNRNLMQLINDSNLSFKSIIEKEQVSTTDKDLQSIVADLAGSPAIKKGILQSLKIVDELVSIMGYPPQTIVVEMARENQTTVKGKNNSRPRYKSLEKAIKEFGSQILKEHPTDNQELKNNRLYLYYLQNGKDIYTGQELDIHNLSNYDIDHIVPQSFITDNSIDNLVLTSSAGNREKGDDVPPLEIVRKRKVFWEKLYQGNLMSKRKFDYLTKAERGGLTEADKARFIHRQLVETRQITKNVANILHQRFNNETDNHGNTMEQVRIVTLKSALVSQFRKQFQLYKVREVNDYHHAHDAYLNGVVANTLLKVYPQLEPEFVYGEYHQFDWFKANKATAKKQFYTNIMLFFAQKERIIDENGEILWDKKYLETIKKVLDYRQMNIVKKTEIQKGEFSKATIKPKGNSSKLIPRKENWDPMKYGGLDSPNMAYAVIIEHAKGKKKIVIEKKLIQINIMERKMFEKDEEAFLEEKGYRHPKVLTKLPKYTLYECEKGRRRMLASANEAQKGNQLVLSNHLVSLLYHAKNCEASDGKSLKYTEAHRETFSELLAQVSEFATRYTLADANLSKINNLFEQNKEGDIKXIAQSFVDLMVFNAMGAPASFKFFEATIDRKRYTNLKELLSSTIIYQSITGLYESRKRLDD

SEQ ID NO: 532 - protein, 1334 aa, Listeria monocytogenes; identical to SEQ ID NO: 114

SEQ ID NO: 533 - protein, 1334 aa, Listeria monocytogenes
MKNPYTIGLDIGTNSVGWAVLTDQYDLVKRKMKVAGNSDKKQIKKNFWGVRLFDDGQTAVDRRMNRTARRRIERRRNRISYLQEIFAVEMANIDANFFCRLNDSFYVDSEKRNSRHPFFATIEEEVAYHKNYRTIYHLREELVNSSEKADLRLVYLALAHIIKYRGNFLIEGALDTKNTSVDEVYKQFIQTYNQVFMSNIEEGALAKVEENTEVASILAGKFTRREKFERILRLYPGEKSTGMFAQFISLIVGNKGNFQKVFNLVEKTDIECAKDSYEEDLEALLAIIGDEYAELFVAAKNTYNAVVLSSIITVTATETNAKLSASMIERFDAHEKELGELKAFIKLHLPKQYQEIFNNAEIDGYAGYIDGKTKQVDFYKYLKTTLENVEGADYFITKIEEENFLRKQRTFDNGVIPHQLHLEELEAILHQQAKYYPFLREGYDKIKSLVTFRIPYFVGPLANGQSEFAWLTRKDDGEIRPWNIEEKVDFGKSAVDFIEKMTNKDTYLPKENVLPKHSLCYQKYMVYNELTKIRYIDDQGKTNYFSGREKQQIFNDLFKQKRKVKKKDLELFLRNINHIESPTIEGLEDSFNASYATYHDLLKVGLKQEILDNPLNTEILEDIVKILTVFEDKRMIKEQLEQFSDVLDGVVLKKLERRHYTGWGRLSAKLLVGIRDKQSHLTILDYLMNDDGLNRNLMQLINDSNLSFKSIIEKEQVSTTDKDLQSIVADLAGSPAIKKGILQSLKIVDELVSIMGYPPQTIVVEMARENQTTGKGKNNSKPRYKSLEKAIKDFGSQILKEHPTDNQELKNNRLYLYYLQNGKDIYTGQELDIHNLSNYDIDHIVPQSFITDNSIDNLVLTSSAGNREKGGDVPPLEIVRKRKVFWEKLYQGNLMSKRKFDYLTKAERGGLTEADKARFIHRQLVETRQITKNVANILHQRFNKETDNHGNTMEQVRIVTLKSALVSQFRKQFQLYKVREVNDYHHAHDAYLNGVVANTLLKVYPQLEPEFVYGEYHQFDWFKANKATAKKQFYTNIMLFFAQKERIIDENGEILWDKKYLETIKKVLDYRQINIVKKTEIQKGEFSKATIKPKGNSSKLIPRKENWDPMKYGGLDSPNMAYAVIIEHAKGKKKIVIEKKLIQINIMERKMFEKDEEAFLEEKGYHQPKVLTKLPKYTLYECEKGRRRMLSSANEAQKGNQLVLSNHLVSLLYHAKNCEASDGKSLKYIEAHRETFSELLAQVSEFATKYTLADANLSKINNLFEQNKEGDIKAIAQSFVDLMAFNAMGAPASFKFFEATIDRKRYTNLKELLSSTIIYQSITGLYESRKRLDD

SEQ ID NO: 534 - protein, 1334 aa, Listeria monocytogenes
MKNPYTIGLDIGTNSVGWAVLTDQYDLVKRKMKVAGNSDKKQIKKNFWGVRLFDDGQTAVDRRMNRTARRRIERRRNRISYLQEIFAVEMANIDANFFCRLNDSFYVDSEKRNSRHPFFATIEEEVAYHKNYRTIYHLREELVNSSEKADLRLVYLALAHIIKYRGNFLIEGALDTKNTSVDEVYKQFIQTYNQVFMSNIEEGALAKVEENTEVASILAGKFTRREKFERILRLYPGEKSTGMFAQFISLIVGNKGNFQKVFNLVEKTDIECAKDSYEEDLEALLAIIGDEYAELFVAAKNTYNAVVLSSIITVTATETNAKLSASMIERFDAHEKELGELKAFIKLHLPKQYQEIFNNAEIDGYAGYIDGKTKQVDFYKYLKTTLENVEGADYFITKIEEENFLRKQRTFDNGVIPHQLHLEELEAILHQQAKYYPFLREGYDKIKSLVTFRIPYFVGPLANGQSEFAWLTRKDDGEIRPWNIEEKVDFGKSAVDFIEKMTNKDTYLPKENVLPKHSLCYQKYMVYNELTKIRYIDDQGKTNYFSGREKQQIFNDLFKQKRKVKKKDLELFLRNINHIESPTIEGLEDSFNASYATYHDLLKVGLKQEILDNPLNTEILEDIVKILTVFEDKRMIKEQLEQFSDVLDGVVLKKLERRHYTGWGRLSAKLLVGIRDKQSHLTILDYLMNDDGLNRNLMQLINDSNLSFKSIIEKEQVSTTDKDLQSIVADLAGSPAIKKGILQSLKIVDELVSIMGYPPQTIVVEMARENQTTGKGKNNSKPRYKSLEKAIKDFGSQILKEHPTDNQELKNNRLYLYYLQNGKDIYTGQELDIHNLSNYDIDHIVPQSFITDNSIDNLVLTSSAGNREKGGDVPPLEIVRKRKVFWEKLYQGNLMSKRKFDYLTKAERGGLTEADKARFIHRQLVETRQITKNVANILHQRFNKETDNHGNTMEQVRIVTLKSALVSQFRKQFQLYKVREVNDYHHAHDAYLNGVVANTLLKVYPQLEPEFVYGEYHQFDWFKANKATAKKQFYTNIMLFFAQKERIIDENGEILWDKKYLETIKKVLDYRQINIVKKTEIQKGEFSKATIKPKGNSSKLIPRKENWDPVKYGGLDSPNMAYAVIIEHAKGKKKIVIEKKLIQINIMERKMFEKDEEAFLEEKGYHQPKVLTKLPKYTLYECEKGRRRMLSSANEAQKGNQLVLSNHLVSLLYHAKNCEASDGKSLKYIEAHRETFSELLAQVSEFATKYTLADANLSKINNLFEQNKEGDIKAIAQSFVDLMAFNAMGAPASFKFFEATIDRKRYTNLKELLSSTIIYQSITGLYESRKRLDD

SEQ ID NO: 535 - protein, 1099 aa, Listeria monocytogenes
MKNPYTIGLDIGTNSVGWAVLTDQYDLVKRKMKVAGNSDKKQIKKNFWGVRLFDDGQTAVDRRMNRTARRRIERRRNRISYLQEIFAVEMANIDANFFCRLNDSFYVDSEKRNSRHPFFATIEEEVAYHKNYRTIYHLREELVNSSEKADLRLVYLALAHIIKYRGNFLIEGALDTKNTSVDEVYKQFIQTYNQVFMSNIEEGALAKVEENTEVASILAGKFTRREKFERILRLYPGEKSTGMFAQFISLIVGNKGNFQKVFNLVEKTDIECAKDSYEEDLEALLAIIGDEYAELFVAAKNTYNAVVLSSIITVTATETNAKLSASMIERFDAHEKELGELKAFIKLHLPKQYQEIFNNAEIDGYAGYIDGKTKQVDFYKYLKTTLENVEGADYFITKIEEENFLRKQRTFDNGVIPHQLHLEELEAILHQQAKYYPFLREGYDKIKSLVTFRIPYFVGPLANGQSEFAWLTRKDDGEIRPWNIEEKVDFGKSAVDFIEKMTNKDTYLPKENVLPKHSLCYQKYMVYNELTKIRYIDDQGKTNYFSGREKQQIFNDLFKQKRKVKKKDLELFLRNINHIESPTIEGLEDSFNASYATYHDLLKVGLKQEILDNPLNTEILEDIVKILTVFEDKRMIKEQLEQFSDVLDGVVLKKLERRHYTGWGRLSAKLLVGIRDKQSHLTILDYLMNDDGLNRNLMQLINDSNLSFKSIIEKEQVSTTDKDLQSIVADLAGSPAIKKGILQSLKIVDELVSIMGYPPQTIVVEMARENQTTGKGKNNSKPRYKSLEKAIKDFGSQILKEHPTDNQELKNNRLYLYYLQNGKDIYTGQELDIHNLSNYDIDHIVPQSFITDNSIDNLVLTSSAGNREKGGDVPPLEIVRKRKVFWEKLYQGNLMSKRKFDYLTKAERGGLTEADKARFIHRQLVETRQITKNVANILHQRFNKETDNHGNTMEQVRIVTLKSALVSQFRKQFQLYKVREVNDYHHAHDAYLNGVVANTLLKVYPQLEPEFVYGEYHQFDWFKANKATAKKQFYTNIMLFFAQKERIIDENGEILWDKKYLETIKKVLDYRQINIVKKTEIQKGEFSKATIKPKGIPAN

SEQ ID NO: 536 - protein, 1334 aa, Listeria monocytogenes
MKNPYTIGLDIGTNSVGWAVLTDQYDLVKRKMKVAGNSDKKQIKKNFWGVRLFDEGETAADRRMNRTARRRIERRRNRISYLQEIFALEMANIDANFFCRLNDSFYVDSEKRNSRHPFFATIEEEVAYHKNYRTIYHLREELVNSSEKADLRLVYLALAHIIKYRGNFLIEGALDTKNTSVDGVYKQFIQTYNQVFISNIEEGTLAKMEENTTVADILAGKFTRKEKLERILQLYPGEKSTGMFAQFISLIVGSKGNFQKVFDLVEKTDIECAKDSYEEDLEALLAIIGDEYAELFVAAKNTYNAVVLSSIITVTDTETNAKLSASMIERFDAHEKDLSELKAFIKLHLPKQYEEIFSNVAIDGYAGYIDGKTKQVDFYKYLKTLLENIEGADYFIAKIEEENFLRKQRTFDNGAIPHQLHLEELEAILHQQAKYYPFLKEAYDKIKSLVTFRIPYFVGPLANGQSDFAWLTRKADGEIRPWNIEEKVDFGKSAVDFIEKMTNKDTYLPKENVLPKHSLYYQKYMVYNELTKVRYIDDQGKTNYFSGQEKQQIFNDYFKQKRKVSKKDLEQFLRNMSHIESPTIEGLEDSFNSSYATYHDLLKVGIKQEVLENPLNTEMLEDIVKILTVFEDKRMIKEQLQQFSDVLDGAVLKKLERRHYTGWGRLSAKLLVGIRDKQSHLTILDYLMNDDGLNRNLMQLINDSNLSFKSIIEKEQVSTTDKDLQSIVADLAGSPAIKKGILQSLKIVDELVSIMGYPPQTIVVEMARENQTTVKGKNNSRPRYKSLEKAIKEFGSQILKEHPTDNQELRNNRLYLYYLQNGKDMYTGQELDIHNLSNYDIDHIVPQSFITDNSIDNLVLTSSAGNREKGDDVPPLEIVRKRKVFWEKLFQGNLMSKRKFDYLTKAERGGLTEADKATFIHRQLVETRQITKNVANILHQRFNNETDNHGNNMEQVRIVMLKSALVSQFRKQFQLYKVREVNDYHHAHDAYLNGVVANTLLKVYPQLEPEFVYGEYHQFDWFKANKATAKKQFYTNIMLFFAQKERIIDENGEILWDKKYLETIKKVLDYRQMNIVKKTEIQKGEFSKATIKPKGNSSKLIPRKENWDPMKYGGLDSPNMAYAVIIEHAKGKKKVVFEKKIIRITIMERKAFEKDEKSFLEKQGYRQPKVLTKLPKYTLYECENGRRRMLASANEAQKGNQQVLKGQLITLLHHAKNCEASDGKSLDYIESNREMFGELLAHVSEFAKRYTLADANLSKINQLFEQNKDNDIKVIAQSFVNLMAFNAMGAPASFKFFEATIERKRYTNLKELLSATIIYQSITGLYEARKRLDG

SEQ ID NO: 537 - protein, 1334 aa, Listeria monocytogenes
MKNPYTIGLDIGTNSVGWAVLTNQYDLVKRKMKVAGNSDKKQIKKNFWGVRLFDDGQTAVDRRMNRTARRRIERRRNRISYLQEIFAVEMANIDANFFCRLNDSFYVDSEKRNSRHPFFATIEEEVAYHKNYRTIYHLREELVNSSEKADLRLVYLALAHIIKYRGNFLIEGALDTKNTSVDGVYEQFIQTYNQVFMSNIEEGTLAKVEENIEVANILAGKFTRREKFERILQLYPGEKSTGMFAQFISLIVGSKGNFQKVFDLIEKTDIECAKDSYEEDLEALLAIIGDEYAELFVAAKNTYNAVVLSSIITVTATETNAKLSASMIERFDAHEKDLGELKAFIKLHLPKQYQEIFNNAAIDGYAGYIDGKTKQVDFYKYLKTILENIEGADYFIAKIEEENFLRKQRTFDNGAIPHQLHLEELEAIIHQQAKYYPFLREDYEKIKSLVTFRIPYFVGPLAKGQSEFAWLTRKADGEIRPWNIEEKVDFGKSAVDFIEKMTNKDTYLPKENVLPKHSLCYQKYMVYNELTKVRYIDDQGKTNYFSGQEKQQIFNDLFKQKRKVKKKDLELFLRNINHIESPTIEGLEDSFNASYATYHDLLKVGMKQEILDNPLNTEMLEDIVKILTVFEDKPMIKEQLQQFSDVLDGGVLKKLERRHYTGWGRLSAKLLVGIREKQSHLTILDYLMNDDGLNRNLMQLINDSNLSFKSIIEKEQVSTTDKDLQSIVADLAGSPAIKKGILQSLKIVDELVSIMGYPPQTIVVEMARENQTTGKGKNNSKPRYKSLEKAIKEFGSKILKEHPTDNQELKNNRLYLYYLQNGKDMYTGQELDIHNLSNYDIDHIVPQSFITDNSIDNLVLTSSAGNREKGGDVPPLEIVRKRKVFWEKLYQGNLMSKRKFDYLTKAERGGLTDADKARFIHRQLVETRQITKNVANILHQRFNNETDNHGNTMEQVRIVTLKSALVSQFRKQFQLYKVREVNDYHHAHDAYLNGVVANTLLKVYPQLEPEFVYGEYHQFDWFKANKATAKKQFYTNIMLFFGQKERIIDENGEILWDKKYLETIKKVLDYRQMNIVKKTEIQKGEFSKATIKPKGNSSKLIPRKENWDPMKYGGLDSPNMAYAVIIEHAKGKKKLIFEKKIIRITIMERKMFEKDEEAFLEEKGYRHPKVLTKLPKYTLYECEKGRRRMLASANEAQKGNQLVLSNHLVSLLYHAKNCEASDGKSLKYIEAHRETFSELLAQVSEFATRYTLADANLSKINNLFEQNKEGDIQAIAQSFVDLMAFNAMGAPASFKFFEATIDRKRYTNLKELLSSTIIYQSITGLYESRKRLDD

SEQ ID NO: 538 - protein, 874 aa, Listeria seeligeri; identical to SEQ ID NO: 180

SEQ ID NO: 539 - protein, 1087 aa, Listeriaceae bacterium
MKKLVLGLDIGVASVGWGIIDAENGDVVDTGVRLFSSRDASENESRRTSRQSRRLSRRKKHRRERIKQLLLAHDMDICDIVNENPYELRVKGLNEKLEVSEIYVALTHLAKRRGVSYLDDVVEEGGTIKSEHLNKNMEEIKSGKMPCEIQLERFEKYGQVRGMIEINQDTEESSFLVNIFRTSDYIKEAKTILATQQKFHKQITNEFIDEYIHIMASKRDYFIGPGNEKSRTDYGVYRTNGDTWDNLFEILIGKCSVFPEETRAARSSYVAQEFNLLNDLNNLKISNLESGKLSASQKHDIVEKVKNSKKFGTKDLLKYIASVCECKIEDIGGCRVDKNRKPIMHTFENYRKVHNALNEAGVDLRLSETDYDELMKIMTLNSETLEIKKQCKEKLPQLTEDYLNVCLVLNKKGAFSGWHALSLKAMKLMMPELYGTSKNQMQIIHTMQLGKAYLKPLNQQKYLNSEAILEEIYNPIAARSIRQTIKVTNAILKKYGHLDSVIIEMPRDYQTSEDERKMIEKMQKENEKEKKAALKRAREEYPFPDEAFRNHKELATKLRLWYQQDQFCVYSGRKISVVDLVRNPNQFEIDHIIPQSVSLDDSLNNKVLCFSEENQKKGQQTPFYYHKGKSGNWTYEQYKLFVEKLFDKKKISNKKRELLLFEEDINKWDVRRGFIARNLVDTRYASRVILNSYQQYFGNHEMGTKVKVVRGKFTSQLRKKWRIFKDRNESHSHHAIDALIVAATANLRLWKKNTLGVSDEGKVYDKETGEILPFEKLTESEYNEMMNKEPYLNFKTKLQNIETKVKYSYRVSKKVNRKISDATIYSTRERDGIDYIVGKIKNIYDVKTYKDQFLKRYKKNKEQFLMYQHDPQTFAILENIMATYQDAENPFLAYKKEYGVIRKYSKKGGGSPVTSLKFIDKVLGQKIDLTAKNQAALPKNKKVVLQSITPYRADVYYDEIDKRYHLIGVKYSLFSFSKQGYVINPIAYQKLLEKEQIHSEMKFCFSLYREDIIEFGEDPDSLTRYRFWSKNESGKNKIEVKPIEKPNFEKQTVLTITKKIKILNKYQTDVLGNSFKAQEEKDPRNIE

SEQ ID NO: 540 - protein, 1345 aa, Marinilabilia sp.
MKKILGLDLGTTSIGWAFIKEPEKDVVGSEIVDMGVRIVALSSDEENDFAKGNTISINADRTLKRGARRNLQRFKLRRDALLEIFKEMKLIPSNFKYAEDGPSSTFSTLKLRDKAAKEKIELDDLVKVLLQINKKRGYRSSRKAKSEEDDGSAIDSMGIAKELYENDLTPGQWVFEALQKGRKNVPDFYRSDLQEEFKKIVNYQSEFYPDVLNSSFVEDWMGKASTPTKQYFNKKGVHLAENKGKREERRLQEYNWRAVAVNSKIDLSEIALILSQINSQISNSSGYLGAISDRSKELYFKNQTVGQYLYQQIKINPHTRLKGQVFYRQDYLDEFEKIWSVQSGFHPQLNDALKKEIRDITIFFQRRLKSQKHLISNCEFEDYHKVVPKSHPIFQEFRIWQNLNNLTLIKKDNLNEKSELALEDKIALANELAFKREQSVKDALNILGLKSSEWEFNFTKIEGNRTNHAFFEAFAKIIEIEDGEPLDLGNLKADDILDQFSEAFLRIGIDPGLLQVNNDIEGPNYEKQPYIQFWHLLYSSEDDQKLKQNLIKKFGFKPDHAKILASISLQDDHASLSSRAIKKILPHLQSGLIYDKACTYAGYNHSSSFTKEENEKRELSSELDLLKKNSLRNPVVEKILNQMINVVNAILKDPNLGKPDEIRVEMARELKANAEQRKNMTSNIASATRDHEKYREILKKEFGLKRVTKNDLLRYKLWLETDGISLYTGKPIEASKLFSKEYDIEHIIPKTRLFDDSFSNKTICERQLNIDKANVTAFSFLQNKLSGDEFEQYQSRVKSLFGKLSKAKIQKLLMANDKIPEDFIARQLQETRYISKKAKEILFEITRRVSVTTGTITDKLREDWGLVEIMKELNWEKYDKLGLTYTIEGKHGERLNKIKDWSKRNDHRHHAMDALTVALTKPAYIQYLNNLNAKELNGKKSTEIFAIEQKYLKRENGKLCFIPPVENIRTEAKKHLSKVLISYKAKNKVVTINKNRTNKKAGFNEQIALTPRGQLHKETVYGKAFHYSTKFEKIGASFDVQKINAVAKKEEREALLKRLAENGDDPKKAFTGKNSLSKMPIYLDLKRNIKLPEKVKTVVLEQNYTIRKNIDPDLKLDKVIDVGVKRILENRLKEFGGNAKLALSNLDENPIWLNKEKGITIKRVKISGVSNVESLHVKKDHFGEPILDQVGNEIPVDFVSTGNNHHVAIYEDEKGNLQEEVVSFFEAVVRQNQGLPIINKNHSLGWKFLFTLKQNEYFVFPSDDFDPTDVDLMDEENYHLISPNLFRVQKFTTKDYFFRHHLETTVEDKSELKGVSFKRLGLPGLNCIKKIRINHLGKIIQVGEY

SEQ ID NO: 541 - protein, 1091 aa, Mobiluncus mulieris
MDSRKYRVGIDVGTNSVGFAAVEEDDSGSPTRFLNTMVVIHDSGVDSEQKKYAITRLASAGTARRTRRLYRTRRQRLRELDDFISNELGYPLVNLENFADPYEPWKVRADLATTKLPNDELPEAMSIALRHMARHRGWRSPYQRVEALHLHAEISKEFAALKERVVEKTGDVFSDDATPAEVLVDLMGRQKVRGADGVLSGKLRQSDNANELRKIASVQGIDDETLNRIIDRVFSSKSPKGKASERVGMDALPGQGSKPRALKAMPSFQKFRVVSVICNLRIKDSGGDARPLSMEEKEKLIDYLMSSTTDDHVTWTDVADLLHVKRSQLQGTAKEGFDGERPYTRPPVNSTWSKIKDSKIKSLVALWKTGDVDVQSAIVEALSNASVLEDSRPGADIVVAYLESLDDKELESLDKVGLPAGRASYSEDSLERLTERMLRDDCDLFEARKREFNVADDWKPPADPIYAPVGNPGVDRVLKIVNRLLMAAEREWGAPTQINIEHVRSGFSSELMQREFERENERRRAQNEEAVKAILTEKGGNSRVSKYDITRYYAVKRQHCQCLYCGTPITFSDCELDHIVPRKGVGSTNTRVNLAAACRSCNRDKSNLPFAVWAGKASNFDVSIDDAVSRVKQWQRSQNEGVREFRAFQNEVISRLLKTTEDPEIDSRSLESVAWMARELHHRVEYYFQSKGAQTQVSVYRGAVTAQARKSSGLEDKVKMIGGGGKTRLDRRHHAMDAATIALMTPGISTTLSEKNNLRDAQKFTGQSETWKDYCGRTETARKHFAVWKSNMERLTDLFNDKLENDAIPVVQPLRLRLSNSKAHDDGIGKLDSKKLGSVWSLADIDRAATPQIWTALTRCDDFDPTKGLPENANRVIRAQGVKYESEDNIPVFPSNVAAIAVRDGYAEIGSTIHHARIYRIDDGKKTFYSMIRVFAVDLLKHQAEDLFTVKLPPSAISIRTCEDSLRRALSNGTAEYLGWLVPGDEIIVDTSDKAFHTGQIGDLLRNFPVNSFRLTGFPSNSRLRLKPVLLAGEGLRDDAEDSIKKILLGQGWRPAINVLFSKGKPRIVRRNSLGIERPSSNNGLPFSWEA

SEQ ID NO: 542 - protein, 1233 aa, Mycoplasma canis
MEKKRKVTLGFDLGIASIGWAIVDSETNQVYKLGSRLFDAPDTNLERRTQRGTRRLLRRRKYRNQKFYNLVKRTEVFGLSSREAIENRFRELSIKYPNIIELKTKALSQEVCPDEIAWILHDYLKNRGYFYDEKETKEDFDQQTVESMPSYKLNEFYKKYGYFKGALSQPTESEMKDNKDLKEAFFFDFSNKEWLKEINYFFNVQKNILSETFIEEFKKIFSFTRDISKGPGSDNMPSPYGIFGEFGDNGQGGRYEHIWDKNIGKCSIFTNEQRAPKYLPSALIFNFLNELANIRLYSTDKKNIQPLWKLSSIDKLNILLNLFNLPISEKKKKLTNANINDIVKKESTKSIMLSVEDIDMIKDEWAGKEPNVYGVGLSGLNIEESAKENKFKFQDLKILNVLINLLDNVGIKFEFKDRNDIIKNLELLDNLYLFLIYQKESNNKDSSIDLFIAKNELLNIENLKLKLKEFLLGAGNEFENHNSKTHSLSKKAIDAILPKLLDNNEGWNLEAIKNYDEEIKSQIEDNSSLMAKQDKKYLNDNFLKDAILPPNVKVTFQQAILIFNKIIQKFSKDFEIDKVVIELAREMTQDQENDALKGIAKAQKSKKSLVEERLEANNIDKSVFNDKYEKLIYKIFLWISQDFKDPYTGAQISTNEIVNNKVEIDHIIPYSLCFDDSSANKVLVHKQSNQEKSNSLPYEYIKQGHSGWNWDEFTKYVKRVFVNNVDSILSKKERLKKSENLLTTSYDGYDKLGFLARNLNDTRYATILFRDQLNNYAEHHLIDNKKMFKVIAMNGAVTSFIRKNMSYDNKLRLKDRSDFSHHAYDAAIIALFSNKTKTLYNLIDPSLNGIISKRSEGYWVIEDRYTGEIKELKKEDWTSIKNNVQARKIAKEIEEYLIDLDDEVFFSRKTKRKTNRQLYNETIYGIAAKTDEDGITNYYKKEKFSILDDKDIYLRLLREREKFVINQSNPEVIDQIIEIIESYGKENNIPSRDEAINIKYTKNKINYNLYLKQYMRSLTKSLDQFSEEFINQMIANKTFVLYNPTKNTTRKIKFLRLVNDVKINDIRKNQVINKFNGKNNEPKAFYENINSLGAIVFKNSANNFKTLSINTQIAIFGDKNWDIEDFKTYNMEKIEKYKEIYGIDKTYNFHSFIFPGTILLDKQNKEFYYISSIQTVRDIIEIKFLNKIEFKDENKNPDTSKTPKRLMFGIKSIMNNYEQVDISPFGINKKIFE

SEQ ID NO: 543 - protein, 1233 aa, Mycoplasma canis
MEKKRKVTLGFDLGIASVGWAIVDSETNQVYKLGSRLFDAPDTNLERRTQRGTRRLLRRRKYRNQKFYNLVKRTEVFGLSSREAIENRFRELSIKYPNIIELKTKALSQEVCPDEIAWILHDYLKNRGYFYDEKETKEDFDQQTIESMPSYKLNEFYKKYGYFKGALSQPTESEMKDNKDLKEAFFFDFSNKEWLKEINYFFNVQKNILSETFIEEFKKIFSFTRDISKGPGSDNMPSPYGIFGEFGDNGQGGRYEHIWDKNIGKCSIFTNEQRAPKYLPSALIFNFLNELANIRLYSTDKKNIQPLWKLSSIDKLNILLNLFNLPISEKKKKLTSANINDIVKKESTKSIMLSVEDIDMIKDEWAGKEPNVYGVGLSGLNIEESAKENKFKFQDLKILNVLINLLDNVGIKFEFKDRNDIIKNLELLDNLYLFLIYQKESNNKDSSIDLFIAKNESLNIENLKLKLKEFLLGAGNEFENHNSKTHSLSKKAIDAILPKLLDNNEGWNLEAIKNYDEEIKSQIEDNSFLMAKQDKKYLNDNFLKDAILPPNVKVTFQQAILIFNKIIQKFSKDFEIDKVVIELAREMTQDQENDALKGIAKAQKSKKSLVEERLEANNIDKSVFNEKYEKLIYKIFLWISQDFKDPYTGAKISANEIVDNKVEIDHIIPYSLCFDDSSANKVLVHKQSNQEKSNSLPYEYIKQGHSGWNWDEFTKYVKRVFVNNVDSILSKKERLKKSENLLTTSYDGYDKLGFLARNLNDTRYATILFRDQLNNYAEHHLIDDKKMFKVIAMNGAVTSFIRKNMSYDNKLRLKNRNDFSHHAYDAAIIALFSNKTKTLYNLIDPSLNGIISKRSEGYWVIEDRYTGEIKELKKEDWTSIKNNVQARKIAKEIEEYLIDLDDEVFFSRKTKRKTNRQLYNETIYGIAAKTDEDGITNYYKKEKLSILDDKDIYLRLLREREKFVINQSNPEVIDQIIEIIESYGKENNIPSRDEAINIKYTKNKINYNLYLKQYMRSLTKSLDQFSEEFINQMIANKTFVLYNPTKNTTRKIKFLRLVNDVKINDIRKNQVINKFNGKNNEPKAFYENINSLGAIVFKNSANNFKTLSINTQIAIFGDKNWDIEDFKTYNMEKIEKYKEIYGIDKTYNFHSFIFPGTILLDKQNKEFYYISSIQTVRDIIEIKFLNKIEFKDENKNQDTSKTPKRLMFGIKSIMNNYEQVDISPFGINKKIFE

SEQ ID NO: 544 - protein, 1233 aa, Mycoplasma canis; identical to SEQ ID NO: 247

SEQ ID NO: 545 - protein, 1233 aa, Mycoplasma canis
MEKKRKVTLGFDLGIASVGWAIVDSETNQVYKLGSRLFDAPDTNLERRTQRGTRRLLRRRKYRNQKFYNLVKRTEVFGLSSREAIENRFRELSIKYPNIIELKTKALSQEVCPDEIAWILHDYLKNRGYFYDEKETKEDFDQQTVESMPSYKLNEFYKKYGYFKGALSQPTESEMKDNKDLKEAFFFDFSNKEWLKEINYFFNVQKNILSETFIEEFKKIFSFTRDISKGPGSDNMPSPYGIFGEFGDNGQGGRYEHIWDKNIGKCSIFTNEQRAPKYLPSALIFNFLNELANIRLYSTDKKNIQPLWKLSSVDKLNILLNLFNLPISEKKKKLTSTNINDIVKKESIKSIMISVEDIDMIKDEWAGKEPNVYGVGLSGLNIEENAKENKFKFQDLKILNVLINLLDNVGIKFEFKDRNDIIKNLELLDNLYLFLIYQKESNNKDSSIDLFIAKNKSLNIENLKLKLKEFLLGAGNEFENHNSKSHSLSKKAIDAILPKLLDNNEGWNLEAIKNYDEEIKSQIEDNSSLMAKQDKKYLNDNFLKDAILPPNVKVTFQQAILIFNKIIQKFSKDFEIDKVVIELAREMTQDQENDALKGMAKAQKSKKSLVEERLEANNIDKSVFNDKYEKLIYKIFLWISQDFKDPYTGAQISVNEIVNNKVEIDHIIPYSLCFDDSSANKVLVHKQSNQEKSNSLPYEYIKQGHSGWNWDEFTKYVKRVFVNNVDSILSKKERLKKSENLLTTSYDGYDKLGFLARNLNDTRYATILFRDQLNNYAEHHLIDNKKMFKVIAMNGAVTSFIRKNMSYDNKLRLKDRSDFSHHAYDAAIIALFSNKTKTLYNLIDPSLNGIISKRSEGYWVIEDRYTGEIKELKKEDWTSIKNNVQARKIAKEIEEYLIDLDDEVFFSRKTKRKTNRQLYNETIYGIAAKTDEDGITNYYKKEKFSILDDKDIYLRLLREREKFVINQSNPEVIDQIIEIIESYGKENNIPSRDEAINIKYTKNKINYNLYLKQYMRSLTKSLDKFSEEFINQMIANKTFVLYNPTKNTTRKIKFLRLVNDVKINDIRKNQVINKFNGKNNEPKAFYENINSLGAIVFKNSANNFKTLSINTQIAIFGDKNWDIEDFKTYNMEKIEKYKEIYGIDKTYNFHSFIFPGTILLDKQNKEFYYISSIQTVRDIIEIKFLNKIEFKDENKNQDTSKTPKRLMFGIKSIMNNYEQVDISPFGINKKIFE

SEQ ID NO: 546 - protein, 1233 aa, Mycoplasma canis
MEKKRKVTLGFDLGIASVGWAIVDSETNQVYKLGSRLFDAPDTNLERRTQRGTRRLLRRRKYRNQKFYNLVKRTEVFGLSSREAIENRFRELSIKYPNIIELKTKALSQEVCPDEIAWILHDYLKNRGYFYDEKETKEDFDQQTVESMPSYKLNEFYKKYGYFKGALSQPTESEMKDNKDLKEAFFFDFSNKEWLKEINYFFNVQKNILSETFIEEFKKIFSFTRDISKGPGSDNMPSPYGIFGEFGDNGQGGRYEHIWDKNIGKCSIFTNEQRAPKYLPSALIFNFLNELANIRLYSTDKKNIQPLWKLSSVDKLNILLNLFNLPISEKKKKLTSTNINDIVKKESIKSIMLSVEDIDMIKYEWAGKEPNVYGVGLSGLNIEESAKENKFKFQDLKILNVLINLLDNVGIKFEFKDRNDIIKNLELLDNLYLFLIYQKESNNKDSSIDLFIAKNKSLNIENLKLKLKEFLLGAGNEFENHNSKTHSLSKKAIDAILPKLLDNNEGWNLEAIKNYDEEIKSQIEDNSSLMAKQDKKYLNDNFLKDAILPPNVKVTFQQAILIFNKIIQKFSKDFEIDKVVIELAREMTQDQENDALKGIAKAQKSKKSLVEERLEANNIDKSVFDDKYEKLIYKIFLWISQDFKDPYTGAKISANEIVNNKVEIDHIIPYSLCFDDSSANKVLVHKQSNQEKSNSLPYEYIKQGHSGWNWDEFTKYVKRVFVNNVDSILSKKERLKKSENLLTTSYDGYDKLGFLARNLNDTRYATILFRDQLNNYAEHHLIDNKKMFKVIAMNGAVTSFIRKNMSYDNKLRLKDRSDFSHHAYDAAIIALFSNKTKTLYNLIDPSLNGIISKRSEGYWVIEDRYTGEIKELKKEDWTSIKNNVQARKIAKEIEEYLIDLDDEVFFSRKTKRKTNRQLYNETIYGIAAKTDEDGITNYYKKEKFSILDDKDIYLRLLREREKFVINQSNPEVIDQIIEIIESYGKENNIPSRDEAINIKYTKNKINYNLYLKQYMRSLTKSLDQFSEEFINQMIANKTFVLYNPTKNTTRKIKFLRLVNDVKINDIRKNQVINKFNGKNNEPKAFYENINSLGAIVFKNSANNFKTLSINTQIAIFGDKNWDIEDFKTYNMEKIEKYKEIYGIDKTYNFHSFIFPGTILLDKQNKEFYYISSIQTVRDIIEIKFLNKIEFKDENKNQDTSKTPKRLMFGIKSIMNNYEQVDISPFGINKKIFE

SEQ ID NO: 547 - protein, 1239 aa, Mycoplasma cynos
MEEKRKVTLGFDLGVASVGWAIVDSETNEVYKLGSRLFDIPDTNIDRRAKRGSRRLVRRRSYRNQKFYNLIKRTKTFGFLDKEAIEKEFVLLSIKYPNIIELKVKGLQEEVSKSEAVWILHDYLKNRGYFYDDKEEKDDLENPSIESMPSYKLYEFYKEYGYFKGALSSPTESEKNKDSDLEKAIFFNFSNKEWTKEINHFFKIQKNIFSEDFKAKFMEFFSFIRDISKGPGSENMPSQYSIFGKYGDDGMGGKYQHIWDKNIGKCSIFKDKVRAPKYLPSALFFNLLNELSNIRLYSVDKREKSVLWRLSSKDKINIILNILQIILFKNDGKISNLDINKIVKNESIKSIILNEIDLDLIKDMWFEKEPNVYGIGLSGLNIEENKKENRFKFQDLKIFSVFIDLLKKSNINIEFNNEKDIIHNLKLLDELYFFLITQKYSRDKYGSIKKFILNNKSFNIDNLDEKLNIFLSISDDEFDNHNSKTHSLSKEAIYFIFPKLLHNNEGWNLEAIKNYDIDVREEISKHSFGIKKQDKKYLDDAFLDDAILPPSVKVTIKQSILIFNKIIKKFSNKFQIDNVVIELAREMTQEKEMDAQKSLNRLKKSRKKIIEERLNANNIDSKMFRDKTGEISPNYIYKIYLWISQNFKDPYTGENISANDILKNNVEIDHIIPYSLCFDDSSSNKVLVFKHSNQSKGNFLPFDMISTFSENSVWNWKEYTQYVEKTFKTNLESILDKKERVKKADNLLTSSYDGYDKLGFLARNLNDTRYATILFRDQLINYSENHLIDSKKMFKVIAMNGGVTSFIRKNMSFDSGLKVKDRSIFSHHAYDAAIIALFSNKTKILYNLINPSLDGIISKRSEGYWVLEDRLTGEIRKLNYNDWQSIKNNVEVKKIAREIESHLSNLDNVVMFSRKSKRKTNKELYNETLYGIATRIDENGIKNYYKKEKFNILEDENIYLRLLNERENFIINRSNPEVIDAIIEIFETIDKNKIPARDVAKNIKYTDNKIKYNLYLKDYMRKLVDEFPDKFRKDFIEQMIAKKIFILFNPIKNTTRKIKSLRSINNNKIEDIRKKQVLEKFNTAKNEPRSFYESLNSLGAIIFKNNLNIYKKMSISSQIATFGDKNWKIDDINTYNKEKLNKYKEIYGIDETYDFYSFIFPGTILLDEKNKEFLYISSIQTLKDKIELKFLDRIEFEKKNVNSNLKPKIKREIISTKKLMSDYKIIKISPLGINKKIFE

SEQ ID NO: 548 - protein, 1269 aa, Mycoplasma gallisepticum
MNNSIKSKPEVTIGLDLGVGSVGWAIVDNETNIIHHLGSRLFSQAKTAEDRRSFRGARRLIRRRKYKLKRFINLIWKYNSYFGFKNKEDILNNYQEQQKLHNTVLNLKLEALNAKIDPKALSWILHDYLKNRGHFYEDNRDFNVYPTEELANYFGEYGYYKGIIDSKEDNDDKLEEGLTKYKFSNQHWLEEIKKVLSNQTGLPEKFKEEYESLFSYVRNYSEGPGSINSVSPYGIYHLDEKEGKVVQKYNNIWDKTIGKCSIFPDEYRAPKNSPIAMIFNEINELSTIRSYSIYLTGWFINQEFKKAYLNKLLDLLIKTNSEKPIDARQFKKLREETIAESIGKETLKDVEREEKLEKEDHKWKLKGLKLNTNGKIQYNDLSSLAKFVHKLKQHLKLDFLLEDQYTTLDKINFLQSLFVYLGKHLRYSNRVDSANLKEFSDSNKLFERVLQEQKDDLFKLFEQTDKDDEKILAQTHSLSTKAMLLAITRMTNLDNDEDNQKNNDKGWNFEAIKNFDQKFIDITKKNNNLSLKQDKRYLDDRFINDAILSPGVKRILREATKVFNAILKQFSEEYDVTKVVIELARELSEEKELENTKNYEKLIKKNSDKISERLEALDIAEDKIEDILKSPTKSYKVLLWLQQDHIDPYSQKEIAFEDILTKTEKTEIDHIIPYSISFDDSSSNKLLVLAESNQAKSNQTPYEFITSGNAGIKWEDYEAYCRKFKDGDTSLLDSTQRSKKFAKMMKTDTSSKYDIGFLARNLNDTRYATIVFRDALKDYANNHLVEDKPMFKVVCINGGVTSFLRKNFDKSWYAKKDRDKNIHHAVDASIISIFSNETKTLFNQLTQFADYKLFKNTDGSWKKIDPKTGVVTEVTDENWKQIRVRNQVSEIAKVINKCIQDSNIERKARYSRKIENKTNISLFNDTVYSAKKVGYEDQIKRKNLKTLDIHESAEENKNSKVKKQFVYRKLVNVSLLNNDKLADLFAEKEDILMYRANPWVINLAEQIFNEYTENKKIKSQNVFEKYMLDLTKEFPEKFSEAFVKSMLRNKTAIIYNVEKKVVHRIKRLKILSSELKENKLSNVIIRSKNESGTKLSYQDTINSIALMIMRSIDPTAKKQYIRVPLNTLNLHLGDQDFDLHNIDAYLKKPKFVKYLKANEIGDEYKPWRVLTSGTLLIHKKDKKLMYISSFQNLKDVIEIKNLIETEYKENDDSDPKKKKKANRFLMTLSTILNDYILLDAKDNFDILGLSKNRIDEILNSKLGLDKITK

SEQ ID NO: 549 - protein, 1224 aa, Mycoplasma gallisepticum
MNNSIKSKPEVTIGLDLGVGSVGWAIVDNETNIIHHLGSRLFSQAKTAEDRRSFRGARRLIRRRKYKLKRFINLIWKYNSYFGFKNKEDILNNYQEQQKLHNTVLNLKLEALNAKIDPKALSWILHDYLKNRGHFYEDNRDFNVYPTEELANYFGEYGYYKGIIDSKEDNDDKLEEGLTKYKFSNQHWLEEIKKVLSNQTGLPEKFKEEYESLFSYVRNYSEGPGSINSVSPYGIYHLDEKEGKVVQKYNNIWDKTIGKCSIFPDEYRAPKNSPIAMIFNEINELSTIRSYSIYLTGWFINQEFKKAYLNKLLDLLIKTNSEKPIDARQFKKLREETIAESIGKETLKDVEREEKLEKEDHKWKLKGLKLNTNGKIQYNDLSSLAKFVHKLKQHLKLDFLLEDQYTTLDKINFLQSLFVYLGKHLRYSNRVDSANLKEFSDSNKLFERVLQEQKDDLFKLFEQTDKDDEKILAQTHSLSTKAMLLAITRMTNLDNDEDNQKNNDKGWNFEAIKNFDQKFIDITKKNNNLSLKQDKRYLDDRFINDAILSPGVKRILREATKVFNAILKQFSEEYDVTKVVIELARELSEEKELENTKNYEKLIKKNSDKISERLEALDIAEDKIEDILKSPTKSYKVLLWLQQDHIDPYSQKEIAFEDILTKTEKTEIDHIIPYSISFDDSSSNKLLVLAESNQAKSNQTPYEFITSGNAGIKWEDYEAYCRKFKDGDTSLLDSTQRSKKFAKMMKTDTSSKYDIGFLARNLNDTRYATIVFRDALKDYANNHLVEDKPMFKVVCINGGVTSFLRKNFDKSWYAKKDRDKNIHHAVDASIISIFSNETKTLFNQLTQFADYKLFKNTDGSWKKIDPKTGVVTEVTDENWKQIRVRNQVSEIAKVINKCIQDSNIERKARYSRKIENKTNISLFNDTVYSAKKVGYEDQIKRKNLKTLDIHESAEENKNSKVKKQFVYRKLVNVSLLNNDKLADLFAEKEDILMYRANPWVINLAEQIFNEYTENKKIKSQNVFEKYMLDLTKEFPEKFSEAFVKSMLRNKTAIIYNVEKKVVHRIKRLKILSSELKENKLSNVIIRSKNESGTKLSYQDTINSIALMIMRSIDPTAKKQYIRVPLNTLNLHLGDQDFDLHNIDAYLKKPKFVKYLKANEIGDEYKPWRVLTSGTLLIHKKDKKLMYISSFQNLKDVIEIKNLIETEYKENDDSDPKKRRKQIGS

SEQ ID NO: 550 - protein, 1269 aa, Mycoplasma gallisepticum; identical to SEQ ID NO: 138

SEQ ID NO: 551 - protein, 226 aa, Mycoplasma iowae
MSNKKKITIGLDIGVSSVGWSILREDNVLIDYGSRLFPDAANAKDGKLENEARRSHRSMRRRIRRIKTRKNDLIKLLIKYNIISDQDELAKILEQGIVNETGNVPIVEIKYKGLKEKLSKEELLICLYHYIHKRGYFYITEEDLKENGENINRLPTEIQYDFYMKNGYYIGNEDNQKFSNLIWVKEIEKFLSKQSLDSNFVDEYISLFRRVRDYSDGPGSEKSPTP

SEQ ID NO: 552 - protein, 1304 aa, Mycoplasma synoviae
MLNNVQNLWKYLLLLIFDKKIIFLFKIKVILIRRYMENNNKEKIVIGFDLGVASVGWSIVNAETKEVIDLGVRLFSEPEKADYRRAKRTTRRLLRRKKFKREKFHKLILKNAEIFGLQSRNEILNVYKDQSSKYRNILKLKINALKEEIKPSELVWILRDYLQNRGYFYKNEKLTDEFVSNSFPSKKLHEHYEKYGFFRGSVKLDNKLDNKKDKAKEKDEEEESDAKKESEELIFSNKQWINEIVKVFENQSYLTESFKEEYLKLFNYVRPFNKGPGSKNSRTAYGVFSTDIDPETNKFKDYSNIWDKTIGKCSLFEEEIRAPKNLPSALIFNLQNEICTIKNEFTEFKNWWLNAEQKSEILKFVFTELFNWKDKKYSDKKFNKNLQDKIKKYLLNFALENFNLNEEILKNRDLENDTVLGLKGVKYYEKSNATADAALEFSSLKPLYVFIKFLKEKKLDLNYLLGLENTEILYFLDSIYLAISYSSDLKERNEWFKKLLKELYPKIKNNNLEIIENVEDIFEITDQEKFESFSKTHSLSREAFNHIIPLLLSNNEGKNYESLKHSNEELKKRTEKAELKAQQNQKYLKDNFLKEALVPLSVKTSVLQAIKIFNQIIKNFGKKYEISQVVIEMARELTKPNLEKLLNNATNSNIKILKEKLDQTEKFDDFTKKKFIDKIENSVVFRNKLFLWFEQDRKDPYTQLDIKINEIEDETEIDHVIPYSKSADDSWFNKLLVKKSTNQLKKNKTVWEYYQNESDPEAKWNKFVAWAKRIYLVQKSDKESKDNSEKNSIFKNKKPNLKFKNITKKLFDPYKDLGFLARNLNDTRYATKVFRDQLNNYSKHHSKDDENKLFKVVCMNGSITSFLRKSMWRKNEEQVYRFNFWKKDRDQFFHHAVDASIIAIFSLLTKTLYNKLRVYESYDVQRREDGVYLINKETGEVKKADKDYWKDQHNFLKIRENAIEIKNVLNNVDFQNQVRYSRKANTKLNTQLFNETLYGVKEFENNFYKLEKVNLFSRKDLRKFILEDLNEESEKNKKNENGSRKRILTEKYIVDEILQILENEEFKDSKSDINALNKYMDSLPSKFSEFFSQDFINKCKKENSLILTFDAIKHNDPKKVIKIKNLKFFREDATLKNKQAVHKDSKNQIKSFYESYKCVGFIWLKNKNDLEESIFVPINSRVIHFGDKDKDIFDFDSYNKEKLLNEINLKRPENKKFNSINEIEFVKFVKPGALLLNFENQQIYYISTLESSSLRAKIKLLNKMDKGKAVSMKKITNPDEYKIIEHVNPLGINLNWTKKLENNN

SEQ ID NO: 553 - protein, 1401 aa, Myroides injenensis
MKRILGLDLGTTSIGWAYVHEAENVNETSSIQKVGVRVNPLTTEEQTNFEKGKPITTNASRTLARSARRNLQRYKLRRDNLIQILKENNWINNTTSLTETGNHSTFETYELRNKAASEKLTLDQLSRVLLMLNKKRGYKSSRKVNSKEEGQLIDGMEVAKKLYHEQLTPGQLSLQLMNQGVKKLPDYYRSDLNQELESIWNFQQQFYPNILTDKFKEEINGKGLTSTSSAFWNIYNFNTAENKGSRDEKKKQALQWRSEALSKQLSKEIVAYIIADLNGQIYNSSGYLGAISDRSKELYFNNLTVGQYLFKQLKSNPHTSLKNQVFYRQDYLNEFEKIWETQSKFYPKELTAALKREIRDVIIFYQRKLKSQKGLISFCEFEQKQKTINGKTKTIGHRVIPKSSPLFQEFKIWQQLHNVVLRNKKTNEIVSLADEQKVHLFEELNLKGKLKSNQVLKLIENKPKDWELNYTELEGNNTNKALYNAYLDILDIEGYDVRNELKVKLNKDDIELSDLDVNASEIKEMIFSVFKHLGINTEILEFDATLEDKVFEKQASYQLWHLLYSYEEDNSPTGLDRLYNLLHKKFGFKLNHAKLIGNVLFQDDYGSLSSKAIKNIFPYITENNYYTACELAGYKHSKHSLTKEENETRELKNRLTILPKNSLRNPVVEKIINQMINVVNTLIDEENNILIAQGKEPNFQFDEIRIELARELKKNAKEREELTKSINKSKTDHEKIIKILQKEDGIKNPTRNDIVRFKLYSELKNNGYKDLYTNEYIERKDIFTKEYDIEHIIPQSKLFDDSFSNKTLVRRNVNLKKGNQTAYDFILCEYGQEKANEFETRITNLYNLGKDEGISKSKFKKLLMQESEIGNGFIERDLRETQYIAKKAKSLLLEITRNVISTSGSITDRLREDWGLINVMKELNLQKYRDAGLTEFVKMKDGNKKEVIIDWTKRNDHRHHAMDALTIAFTKHNHIQYLNHLNARKNVNNELHNNIIAIEKLETTLVSDERGNKKRIFKEPIANFRTIAKSHLEAILVSHKAKNKVVTKNINKISGKKISQQTLTPRGQLHKETIYGKIRQYVSKQEKVGPKFTIEVIEQVSNPTYRNLLLKRLEENNNDPKKAFGGKNSLNKNPIYINLEKNIKVPEVLKLVWLEDNYTIRKEISPDLKIDKVIDQGVKQILQNRLAQYKGDSKLAFSNLDANPIWLNEDKGIAIKRVTISGIATAQPLHRKKDHLGQPILDHNGQEIPVDFISTGNNHHVAIYEDENGKLQESVVSHFEAVERVNQKLPIIDKTFNQHLGWKFLFTMKQNELFLFPSDDFNPNEIDLFDKQNYTVISKHLFRIQKLSTKDYSFRHHLETNVEEIKDLKTITWRREGLNGIQNIIKVRTNHLGEIIHIGEY

SEQ ID NO: 554 - protein, 1466 aa, Myroides odoratus
MKNILGLDLGTNSIGWALVKEDFENKQGEILGLGSRIIPMSQDILGEFGRGNSISQTADRTGYRGVRRLRERHLLRRERLHRVLNILGFLPNHYAKEIDFTKRLGKFINHAEPKLSFDKEFIFKDSFNEMLKDFQQNQPGFIINKHGEEALVPYDWTIYYLRKKALTQKIDKEELAWILLNFNQKRGYYQLRGEEEEENTNKLVEFYSLKIIDVIADNEVNKKGEVWYSLHLENGWIYRRSSKISLVDWKDKVRDFIVTTDVNDDGSEKLDKDGVVKRSFRAPSADDWTLLKKKTEQDIDNSNKTVGAYIYENLLLNPKQKIKGKLVRTIERKFYKDELKQILEKQKEFHQELQNEQLLQDCVRELYKYNEQHQQMLESKDFVHLFLNDIIFYQRPLRSQKSLISNCTLEKRVSRDGVVFPIKVISKSNPYYQEFRLLQWLQNLAIYRKDDDVNVTQEFLNSIESWENLLQFLNAKKEIKQEQLIKFLLEQKGLKGNSLKTAILTYRWNYVTDKVYPMNETRSLIQDKLKKVENVATDFLSFDNEMALWHIIYSVNDKIEYEKALAKFASKHNLDEISFVESFKKFPPFKSDYGSFSEKAIKKLLPLMRFGSVWNKNNIVPSVLDRIDKILTGEYDEKIKIRVREKAEQFQLNQIEDFQNLPLWLAQYVVYDRHSEAEIAGKWNSVKDLENYLKEFKQHSLRNPIVEQIITETLRVVKDIWQQYGNGVQNFFDEIHIELGREMKNTADERKRITNSVTENENTNLRIKALLVELKEDTNIENVRPHSPMQQEILKIYEEGVLNAVENIDEDILKISKTAQPSKSELIRYKLWLEQKYQSPYTGEMIPLSRLFTSDYEIEHVIPQSRYFDDSLSNKVICEAAVNKRKDNQLGLEFIKNHHSEKIELGNGRTAQVLEVEAYESFVKKNYDKNRGKRNKLLLEDVPEKMIERQLNDTRYISKFVTHLLSNIVRKDEVNSKDDGINSKNIIPGNGKITSQLKQDWGLNDVWNELILPRFERMNNLTNSTDFTSTNTNGKIIPTVPLEYSKGFSKKRIDHRHHALDALVIALATRDHVNLLNNESALPKKDRTKEEQKSFRFDLQVNLRNKEKYFNVKEGREKEKFTTFKKPWNTLTQDTRDALENMVVSFKQNLRVINKATNYYESYTDENGNLRLDKYGNPKKELISQKGTNWAIRKSLHKETVSGQIHLDRVKVTKGKIVTATRKSLDSSFNEKSIESITDTGIQKILRNYLKAKDNKPDVAFSPEGIEELNKSISVYNEGKNHQPIIKVRIFEQGSKFPVGETGNKIAKFVEAAKGTNLFFGIYQDKTGKRSYDTIPLNLVIERLKQGLSPVPETNEKGHQLLFHLSPNDLVYVPTIDDNEQLDSNRVYKFTDSSDTTCNFIPSNISAIIFNINSKEQEKRGINYPIQNELGVGSPQSKNQKSFDGFMIKEVCIKLKVDRLGNISKT

SEQ ID NO: 555 - protein, 241 aa, Neisseria lactamica
MAAFKPNPMNYILGLDIGIASVGWAMVEIDKEENPIRLIDLGVRVFERAEMPKTGDSLAMARRLARSVRRLTRRRAHRLLRARRLLKREGVLQDADFDENGLVKSLPNTPWQLRAAALDRKLTCLEWSAVLLHLIKHRGYLSQRKNEGETADKELGALLKGVADNAHALQTGDFRTPAELALNKFEKESGHIRNQRGDYSHTFSRKDLQAELNLLFEKQKEFGNPHVSDGLKEGIETLLMA

SEQ ID NO: 556 - protein, 666 aa, Neisseria lactamica
MAAFKPNPMNYILGLDIGIASVGWAMVEVDEEENPIRLIDLGVRVFERAEVPKTGDSLAMARRLARSVRRLTRRRAHRLLRARRLLKREGVLQDADFDENGLVKSLPNTPWQLRAAALDRKLTCLEWSAVLLHLVKHRGYLSQRKNEGETADKELGALLKGVADNAHALQTGDFRTPAELALNKFEKESGHIRNQRGDYSHTFSRKDLQAELNLLFEKQKEFGNPHVSDGLKEDIETLLMAQRPALSGDAVQKMLGHCTFEPAEPKAAKNTYTAERFIWLTKLNNLRILEQGSERPLTDTERATLMDEPYRKSKLTYAQARKLLGLEDTAFFKGLRYGKDNAEASTLMEMKAYHAISRALEKEGLKDKKSPLNLSTELQDEIGTAFSLFKTDKDITGRLKDRVQPEILEALLKHISFDKFVQISLKALRRIVPLMEQGKRYDEACAEIYGDHYCKKNAEEKIYLPPIPADEIRNPVVLRALSQARKVINCVVRRYGSPARIHIETAREVGKSFKDRKEIEKRQEENRKDREKAAAKFREYFPNFVGEPKSKDILKLRLYEQQHGKCLYSGKEINLVRLNEKGYVEIDHALPFSRTWDDSFNNKVLVLGSENQNKGNQTPYEYFNGKDNSREWQEFKARVETSRFPRSKNNGFCCKNSMKKDLKNAT

SEQ ID NO: 557 - protein, 828 aa, Neisseria lactamica
MLGHCTFEPAEPKAAKNTYTAERFIWLTKLNNLRILEQGSERPLTDTERATLMDEPYRKSKLTYAQARKLLGLEDTAFFKGLRYGKDNAEASTLMEMKAYHAISRALEKEGLKDKKSPLNLSTELQDEIGTAFSLFKTDKDITGRLKDRVQPEILEALLKHISFDKFVQISLKALRRIVPLMEQGKRYDEACAEIYGDHYGKKNTEEKIYLPPIPADEIRNPVVLRALSQARKVINAVVRRYDSPARIHIETAREVGKSFKDRKEIEKRQEENRKDREKAAAKFREYFPNFVGEPKSKDILKLRLYEQQHGKCLYSGKEINLVRLNEKGYVEIDHALPFSRTWDDSFNNKVLVLGSENQNKGNQTPYEYFNGKDNSREWQEFKARVETSRFPRSKKQRILLQKFDEEGFKERNLNDTRYVNRFLCQFVADHILLTGKGKRRVFASNGQITNLLRGFWGLRKVRAENDRHHALDAVVVACSTVAMQQKITRFVRYKEMNAFDGKTIDKETGEVLHQKAHFPQPWEFFAQEVMIRVFGKPDGKPEFEEADTSEKLRTLLAEKLSSRPEAVHEYVTPLFVSRAPNRKMSGQGHMETVKSAKRLDEGISVLRVPLTQLKLKDLEKMVNREREPKLYDALKAQLETHKDDPAKAFAEPFYKYDKAGSRTQQVKAVRIEQVQKTGVWVRNHNGIADNATMVRVDVFEKGGKYYLVPIYSWQVAKGILPDRAVVAFKDEEDWTVMDDSFEFRFVLYANDLIKAELKKETFFGYFSGLDRSTGNISLRSHDLDKTKGKDGVYRIGIKTALSFQKHQIDELGKEIRPCRLKKRPPVR

SEQ ID NO: 558 - protein, 408 aa, Neisseria lactamica
MNDTRYVNRFLCQFVADHILLTGKGKRRVFASNGQITNLLRGFWGLRKVRTENDRHHALDAVVVACSTVAMQQKITRFVRYKEMNAFDGKTIDKETGEVLHQKAHFPQPWEFFAQEVMIRVFGKPDGKPEFEEADTPEKLRTLLAEKLSSRPEAVHEYVTPLFVSRAPNRKMSGQGHMETVKSAKRLDEGISVLRVPLTQLKLKGLEKMVNREREPKLYDALKAQLETHKDDPAKAFAEPFYKYDKAGSRTQQVKAVRIEQVQKTGVWVRNHNGIADNATMVRVDVFEKGGKYYLVPIYSWQVAKGILPDRAVVAFKDEEDWTVMDDSFEFRFVLYANDLIKLTAKKNEFLGYFVSLNRATGAIDIRTHDTDSTKGKNGIFQSVGVKTALSFQKTKSTNSAKKSDHAV

SEQ ID NO: 559 - protein, 1082 aa, Neisseria meningitidis
MAAFKPNPINYILGLDIGIASVGWAMVEIDEDENPICLIDLGVRVFERAEVPKTGDSLAAARRLARSVRRLTRRRAHRLLRARRLLKREGVLQAADFDENGLIKSLPNTPWQLRAAALDRKLTPLEWSAVLLHLIKHRGYLSQRKNEGETADKELGALLKGVADNAHALQTGDFRTPAELALNKFEKESGHIRNQRGDYSHTFSRKDLQAELILLFEKQKEFGNPHVSGGLKEGIETLLMTQRPALSGDAVQKMLGHCTFEPAEPKAAKNTYTAERFIWLTKLNNLRILEQGSERPLTDTERATLMDEPYRKSKLTYAQARKLLGLEDTAFFKGLRYGKDNAEASTLMEMKAYHAISRALEKEGLKDKKSPLNLSPELQDEIGTAFSLFKTDEDITGRLKDRVQPEILEALLKHISFDKFVQISLKALRRIVPLMEQGKRYDEACAEIYGDHYGKKNTEEKIYLPPIPADEIRNPVVLRALSQARKVINGVVRRYGSPARIHIETAREVGKSFKDRKEIEKRQEENRKDREKAAAKFREYFPNFVGEPKSKDILKLRLYEQQHGKCLYSGKEINLGRLNEKGYVEIDHALPFSRTWDDSFNNKVLVLGSENQNKGNQTPYEYFNGKDNSREWQEFKARVETSRFPRSKKQRILLQKFDEDGFKERNLNDTRYVNRFLCQFVADRMRLTGKGKKRVFASNGQITNLLRGFWGLRKVRAENDRHHALDAVVVACSTVAMQQKITRFVRYKEMNAFDGKTIDKETGEVLHQKTHFPQPWEFFAQEVMIRVFGKPDGKPEFEEADTPEKLRTLLAEKLSSRPEAVHEYVTPLFVSRAPNRKMSGQGHMETVKSAKRLDEGVSVLRVPLTQLKLKDLEKMVNREREPKLYEALKARLEAHKDDPAKAFAEPFYKYDKAGNRTQQVKAVRVEQVQKTGVWVRNHNGIADNATMVRVDVFEKGDKYYLVPIYSWQVAKGILPDRAVVQGKDEEDWQLIDDSFNFKFSLHPNDLVEVITKKARMFGYFASCHRGTGNINIRIHDLDHKIGKNGILEGIGVKTALSFQKYQIDELGKEIRPCRLKKRPPVR

SEQ ID NO: 560 - protein, 976 aa, Neisseria meningitidis
MAAFKPNPINYILGLDIGIASVGWAMVEIDEDENPICLIDLGVRVFERAEVPKTGDSLAAARRLARSVRRLTRRRAHRLLRARRLLKREGVLQAADFDENGLIKSLPNTPWQLRAAALDRKLTPLEWSAVLLHLIKHRGYLSQRKNEGETADKELGALLKGVADNAHALQTGDFRTPAELALNKFEKESGHIRNQRGDYSHTFSRKDLQAELILLFEKQKEFGNPHVSGGLKEGIETLLMTQRPALSGDAVQKMLGHCTFEPAEPKAAKNTYTAERFIWLTKLNNLRILEQGSERPLTDTERATLMDEPYRKSKLTYAQARKLLGLEDTAFFKGLRYGKDNAEASTLMEMKAYHAISRALEKEGLKDKKSPLNLSPELQDEIGTAFSLFKTDEDITGRLKDRIQPEILEALLKHISFDKFVQISLKALRRIVPLMEQGKRYDEACAEIYGDHYGKKNTEEKIYLPPIPADEIRNPVVLRALSQARKVINGVVRRYGSPARIHIETAREVGKSFKDRKEIEKRQEENRKDREKAAAKFREYFPNFVGEPKSKDILKLRLYEQQHGKCLYSGKEINLGRLNEKGYVEIDHALPFSRTWDDSFNNKVLVLGSENQNKGNQTPYEYFNGKDNSREWQEFKARVETSRFPRSKKQRILLQKFDEDGFKERNLNDTRYVNRFLCQFVADRMRLTGKGKKRVFASNGQITNLLRGFWGLRKVRAENDRHHALDAVVVACSTVAMQQKITRFVRYKEMNAFDGKTIDKETGEVLHQKTHFPQPWEFFAQEVMIRVFGKPDGKPEFEEADTPEKLRTLLAEKLSSRPEAVHEYVTPLFVSRAPNRKMSGQGHMETVKSAKRLDEGVSVLRVPLTQLKLKDLEKMVNREREPKLYEALKARLEAHKDDPAKAFAEPFYKYDKAGNRTQQVKAVRVEQVQKTGVWVRNHNGIADNATMVRVDVFEKGDKYYLVPIYSWQVAKGIFAG

SEQ ID NO: 561 - protein, 1081 aa, Neisseria meningitidis
MAAFKPNPINYILGLDIGIASVGWAMVEIDEDENPICLIDLGVRVFERAEVPKTGDSLAAARRLARSVRRLTRRRAHRLLRARRLLKREGVLQAADFDENGLIKSLPNTPWQLRSAALDRKLTPLEWSAVLLHLIKHRGYLSQRKNEGETADKELGALLKGVADNAHALQTGDFRTPAELALNKFEKESGHIRNRRGDYSHTFSRKDLQAELDLLFEKQKEFGNPHISDDLKEGIETLLMTQRPALSGDAVQKMLGHCTFEPTEPKAAKNTYTAERFVWLTKLNNLRILEQGSERPLTDTERATLMDEPYRKSKLTYAQARKLLELDDTAFFKGLRYGKDNAEASTLMEMKAYHAISRALEKEGLKDKKSPLNLSPELQDEIGTAFSLFKTDEDITGRLKDRVQPEILEVLLKHISFDKFVQISLKALRRIVPLMEQGKRYDEACAEIYGDHDGKKNTEEKIYLPPIPADEIRNPVVLRALSQARKVINAVVRRYGSPARIHIETAREVGKSFKDRKEIEKRQEENRKDREKAAAKFREYFPNFVGEPKSKDILKLRLYEQQHGKCLYSGKEINLGRLNEKGYVEIDHALPFSRTWDDSFNNKVLVLGSENQNKGNQTPYEYFNGKDNSREWQEFKARVETSRFPRSKKQRILLQKFDEEGFKERNLNDTRYVNRFLCQFVADHMLLTGKGKRRVFASNGQITNLLRGFWGLRKVRAENNRHHALDAVVVACSTVAMQQKITRFVRYKEMNAFDGKTIDKETGEVLHQKTHFPQPWEFFAQEVMIRVFGKPDGKPEFEEADTPEKLRTLLAEKLSSRPEAVHEYVTPLFVSRAPNRKMSGQGHMETVKSAKRLDEGVSVLRVPLTQLKLKDLEKMVNREREPKLYEALKARLEAHKDDPAKAFAEPFYKYDKAGNRTQQVKAVRVEQVQKTGVWVRNHNGIADNATMVRVDVFEKAGKYYLVPIYSWQVAKGILPDRAVVAYADEEGWTVIDESFRFKFVLYSNDLIKVQLKKDSFLGYFSGLDRATGAISLREHDLEKSKGKDGMHRIGVKTALSFQKYQIDEMGKEIRLCRLKKRPPVR

SEQ ID NO: 562 - protein, 1081 aa, Neisseria meningitidis
MAAFKPNPINYILGLDIGIASVGWAMVEIDEDENPICLIDLGVRVFERAEVPKTGDSLAAARRLARSVRRLTRRRAHRLLRARRLLKREGVLQAADFDENGLIKSLPNTPWQLRSAALDRKLTPLEWSAVLLHLIKHRGYLSQRKNEGETADKELGALLKGVANNAHALQTGDFRTPAELALNKFEKESGHIRNQRGDYSHTFSRKDLQAELILLFEKQKEFGNPHVSGGLKEGIETLLMTQRPALSGDAVQKMLGHCTFEPAEPKAAKNTYTAERFIWLTKLNNLRILEQGSERPLTDTERATLMDEPYRKSKLTYAQARKLLGLEDTAFFKGLRYGKDNAEASTLMEMKAYHAISRALEKEGLKDKKSPLNLSPELQDEIGTAFSLFKTDEDITGRLKDRIQPEILEALLKHISFDKFVQISLKALRRIVPLMEQGKRYDEACAEIYGDHYGKKNTEEKIYLPPIPADEIRNPVVLRALSQARKVINGVVRRYGSPARIHIETAREVGKSFKDRKEIEKRQEENRKDREKAAAKFREYFPNFVGEPKSKDILKLRLYEQQHGKCLYSGKEINLGRLNEKGYVEIDHALPFSRTWDDSFNNKVLVLGSENQNKGNQTPYEYFNGKDNSREWQEFKARVETSRFPRSKKQRILLQKFDEDGFKERNLNDTRYVNRFLCQFVADRMRLTGKGKKRVFASNGQITNLLRGFWGLRKVRAENDRHHALDAVVVACSTVAMQQKITRFVRYKEMNAFDGKTIDKETGEVLHQKTHFPQPWEFFAQEVMIRVFGKPDGKPEFEEADTPEKLRTLLAEKLSSRPEAVHEYVTPLFVSRAPNRKMSGQGHMETVKSAKRLDEGVSVLRVPLTQLKLKDLEKMVNREREPKLYEALKARLEAHKDDPAKAFAEPFYKYDKAGNRTQQVKAVRVEQVQKTGVWVRNHNGIADNATMVRVDVFEKAGKYYLVPIYSWQVAKGILPDRAVVAYADEEGWTVIDESFRFKFVLYSNDLIKVQLKKDSFLGYFSGLDRATGAISLREHDLEKSKGKDGMHRIGVKTALSFQKYQIDEMGKEIRLCRLKKRPPVR

SEQ ID NO: 563 - protein, 1082 aa, Neisseria meningitidis
MAAFKPNPINYILGLDIGIASVGWAMVEIDEDENPICLIDLGVRVFERAEVPKTGDSLAMARRLARSVRRLTRRRAHRLLRARRLLKREGVLQAADFDENGLIKSLPNTPWQLRAAALDRKLTPLEWSAVLLHLIKHRGYLSQRKNEGETADKELGALLKGVADNAHALQTGDFRTPAELALNKFEKESGHIRNQRGDYSHTFSRKDLQAELILLFEKQKEFGNPHVSGGLKEGIETLLMTQRPALSGDAVQKMLGHCTFEPAEPKAAKNTYTAERFIWLTKLNNLRILEQGSERPLTDTERATLMDEPYRKSKLTYAQARKLLGLEDTAFFKGLRYGKDNAEASTLMEMKAYHAISRALEKEGLKDKKSPLNLSPELQDEIGTAFSLFKTDEDITGRLKDRIQPEILEALLKHISFDKFVQISLKALRRIVPLMEQGKRYDEACAEIYGDHYGKKNTEEKIYLPPIPADEIRNPVVLRALSQARKVINGVVRRYGSPARIHIETAREVGKSFKDRKEIEKRQEENRKDREKAAAKFREYFPNFVGEPKSKDILKLRLYEQQHGKCLYSGKEINLGRLNEKGYVEIDHALPFSRTWDDSFNNKVLVLGSENQNKGNQTPYEYFNGKDNSREWQEFKARVETSRFPRSKKQRILLQKFDEDGFKERNLNDTRYVNRFLCQFVADRMRLTGKGKKRVFASNGQITNLLRGFWGLRKVRAENDRHHALDAVVVACSTVAMQQKITRFVRYKEMNAFDGKTIDKETGEVLHQKTHFPQPWEFFAQEVMIRVFGKPDGKPEFEEADTPEKLRTLLAEKLSSRPEAVHEYVTPLFVSRAPNRKMSGQGHMETVKSAKRLDEGVSVLRVPLTQLKLKDLEKMVNREREPKLYEALKARLEAHKDDPAKAFAEPFYKYDKAGNRTQQVKAVRVEQVQKTGVWVRNHNGIADNATMVRVDVFEKGDKYYLVPIYSWQVAKGILPDRAVVQGKDEEDWQLIDDSFNFKFSLHPNDLVEVITKKARMFGYFASCHRGTGNINIRIHDLDHKIGKNGILEGIGVKTALSFQKYQIDELGEEIRPCRLKKRPPVR

SEQ ID NO: 564 - protein, 1082 aa, Neisseria meningitidis
MAAFKPNPINYILGLDIGIASVGWAMVEIDEDENPICLIDLGVRVFERAEVPKTGDSLAMARRLARSVRRLTRRRAHRLLRARRLLKREGVLQAADFDENGLIKSLPNTPWQLRAAALDRKLTPLEWSAVLLHLIKHRGYLSQRKNEGETADKELGALLKGVADNAHALQTGDFRTPAELALNKFEKESGHIRNQRGDYSHTFSRKDLQAELILLFEKQKEFGNPHVSGGLKEGIETLLMTQRPALSSDAVQKMLGHCTFEPAEPKAAKNTYTAERFIWLTKLNNLRILEQGSERPLTDTERATLMDEPYRKSKLTYAQARKLLGLEDTAFFKGLRYGKDNAEASTLMEMKAYHAISRALEKEGLKDKKSPLNLSPELQDEIGTAFSLFKTDEDITGRLKDRIQPEILEALLKHISFDKFVQISLKALRRIVPLMEQGKRYDEACAEIYGDHYGKKNTEEKIYLPPIPADEIRNPVVLRALSQARKVINGVVRRYGSPARIHIETAREVGKSFKDRKEIEKRQEENRKDREKAAAKFREYFPNFVGEPKSKDILKLRLYEQQHGKCLYSGKEINLGRLNEKGYVEIDHALPFSRTWDDSFNNKVLVLGSENQNKGNQTPYEYFNGKDNSREWQEFKARVETSRFPRSKKQRILLQKFDEDGFKERNLNDTRYVNRFLCQFVADRMRLTGKGKKRVFASNGQITNLLRGFWGLRKVRAENDRHHALDAVVVACSTVAMQQKITRFVRYKEMNAFDGKTIDKETGEVLHQKTHFPQPWEFFAQEVMIRVFGKPDGKPEFEEADTPEKLRTLLAEKLSSRPEAVHEYVTPLFVSRAPNRKMSGQGHMETVKSAKRLDEGVSVLRVPLTQLKLKDLEKMVNREREPKLYEALKARLEAHKDDPAKAFAEPFYKYDKAGNRTQQVKAVRVEQVQKTGVWVRNHNGIADNATMVRVDVFEKGDKYYLVPIYSWQVAKGILPDRAVVQGKDEEDWQLIDDSFNFKFSLHPNDLVEVITKKARMFGYFASCHRGTGNINIRIHDLDHKIGKNGILEGIGVKTALSFQKYQIDELGKEIRPCRLKKRPPVR

SEQ ID NO: 565 - protein, 1082 aa, Neisseria meningitidis
MAAFKPNPINYILGLDIGIASVGWAMVEIDEDENPICLIDLGVRVFERAEVPKTGDSLAMARRLARSVRRLTRRRAHRLLRARRLLKREGVLQAADFDENGLIKSLPNTPWQLRAAALDRKLTPLEWSAVLLHLIKHRGYLSQRKNEGETADKELGALLKGVADNAHALQTGDFRTPAELALNKFEKESGHIRNQRGDYSHTFSRKDLQAELILLFEKQKEFGNPHVSGGLKEGIETLLMTQRPALSSDAVQKMLGHCTFEPAEPKAAKNTYTAERFIWLTKLNNLRILEQGSERPLTDTERATLMDEPYRKSKLTYAQARKLLGLEDTAFFKGLRYGKDNAEASTLMEMKAYHAISRALEKEGLKDKKSPLNLSPELQDEIGTAFSLFKTDEDITGRLKDRIQPEILEALLKHISFDKFVQISLKALRRIVPLMEQGKRYDEACAEIYGDHYGKKNTEEKIYLPPIPADEIRNPVVLRALSQARKVINGVVRRYGSPARIHIETAREVGKSFKDRKEIEKRQEENRKDREKAAAKFREYFPNFVGEPKSKDILKLRLYEQQHGKCLYSGKEINLGRLNEKGYVEIDHALPFSRTWDDSFNNKVLVLGSENQNKGNQTPYEYFNGKDNSREWQEFKARVETSRFPRSKKQRILLQKFDEDGFKERNLNDTRYVNRFLYQFVADRMRLTGKGKKRVFASNGQITNLLRGFWGLRKVRAENDRHHALDAVVVACSTVAMQQKITRFVRYKEMNAFDGKTIDKETGEVLHQKTHFPQPWEFFAQEVMIRVFGKPDGKPEFEEADTPEKLRTLLAEKLSSRPEAVHEYVTPLFVSRAPNRKMSGQGHMETVKSAKRLDEGVSVLRVPLTQLKLKDLEKMVNREREPKLYEALKARLEAHKDDPAKAFAEPFYKYDKAGNRTQQVKAVRVEQVQKTGVWVRNHNGIADNATMVRVDVFEKGDKYYLVPIYSWQVAKGILPDRAVVQGKDEEDWQLIDDSFNFKFSLHPNDLVEVITKKARMFGYFASCHRGTGNINIRIHDLDHKIGKNGILEGIGVKTALSFQKYQIDELGKEIRPCRLKKRPPVR

SEQ ID NO: 566 - protein, 1081 aa, Neisseria meningitidis
MAAFKPNPINYILGLDIGIASVGWAMVEIDEDENPICLIDLGVRVFERAEVPKTGDSLAMARRLARSVRRLTRRRAHRLLRARRLLKREGVLQAADFDENGLIKSLPNTPWQLRAAALDRKLTPLEWSAVLLHLIKHRGYLSQRKNEGETADKELGALLKGVADNAHALQTGDFRTPAKLALNKFEKESGHIRNQRGDYSHTFSRKDLQAELNLLFEKQKEFGNPHISDGLKEGIETLLMTQRPALSGDAVQKMLGHCTFEPTEPKAAKNTYTAERFVWLTKLNNLRILEQGSEQPLTDTQRAKLMDEPYRKSKLTYAQARKLLGLEDTAFFKGLRYGKDNAEASTLMEMKAYHAISRALEKEGLKDKKSPLNLSPELQDEIGTAFSLFKTDEDITGRLKDRVQPEILEALLKHISFDKFVQISLKALRRIVPLMEQGKRYNEACAEIYGDHYGKKNTEEKIYLPPIPADEIRNPVVLRALSQARKVINGVVRRYGSPARIHIETAREVGKSFKDRKEIEKRQEENRKDREKAAAKFQEYFPNFVGEPKSKDILKLRLYEQQHGKCLYSGKEINLGRLNEKGYVEIDHALPFSRTWDDSFNNKVLVLGSENQNKGNQTPYEYFNGKDNSREWQEFKARVETSRFPRSKKQRILLQKFDEDGFKERNLNDTRYVNRFLCQFVADRMRLTGKGKKRVFASNGQITNLLRGFWGLRKVRAENDRHHALDAVVVACSTVAMQQKITRFVRYKEMNAFDGKTIDKETGEVLHQKTHFPQPWEFFAQEVMIRVFGKPDGKPEFEEADTPEKLRTLLAEKLSSRPEAVHEYVTPLFVSRAPNRKMSGQGHMETVKSAKRLDEGVSVLRVPLTQLKLKDLEKMVNREREPKLYEALKARLEAHKDDPAKAFAEPFYKYDKAGNRTQQVKAVRVEQVQKTGVWVRNHNGIADNATMVRVDVFEKGDKYYLVPIYSWQVAKGILPDRAVVAYADEEDWTVIDESFRFKFVLYSNDLIKVQLKKDSFLGYFSGLDRATGAISLREHDLEKSKGKDGMHRIGVKTALSFQKYQIDEMGKEIRPCRLKKRPPVR

SEQ ID NO: 567 - protein, 1081 aa, Neisseria meningitidis
MAAFKPNPINYILGLDIGIASVGWAMVEIDEEENPIRLIDLGVRVFERAEVPKTGDSLAMARRLARSVRRLTRRRAHRLLRARRLLKREGVLQAADFDENGLIKSLPNTPWQLRAAALDRKLTPLEWSAVLLHLIKHRGYLSQRKNEGETADKELGALLKGVADNAHALQTGDFRTPAELALNKFEKECGHIRNQRGDYSHTFSRKDLQAELNLLFEKQKEFGNPHVSGGLKEGIETLLMTQRPALSGDAVQKMLGHCTFEPAEPKAAKNTYTAERFIWLTKLNNLRILEQGSERPLTDTERATLMDEPYRKSKLTYAQARKLLSLEDTAFFKGLRYGKDNAEASTLMEMKAYHTISRALEKEGLKDKKSPLNLSPELQDEIGTAFSLFKTDEDITGRLKDRIQPEILEALLKHISFDKFVQISLKALRRIVPLMEQGKRYDEACAEIYGDHYGKKNTEEKIYLPPIPADEIRNPVVLRALSQARKVINGVVRRYGSPARIHIETAREVGKSFKDRKEIEKRQEENRKDREKAAAKFREYFPNFVGEPKSKDILKLRLYEQQHGKCLYSGKEINLGRLNEKGYVEIDHALPFSRTWDDSFNNKVLVLGSENQNKGNQTPYEYFNGKDNSREWQEFKARVETSRFPRSKKQRILLQKFDEDGFKERNLNDTRYVNRFLCQFVADRMRLTGKGKKRVFASNGQITNLLRGFWGLRKVRAENDRHHALDAVVVACSTVAMQQKITRFVRYKEMNAFDGKTIDKETGEVLHQKTHFPQPWEFFAQEVMIRVFGKPDGKPEFEEADTPEKLRTLLAEKLSSRPEAVHEYVTPLFVSRAPNRKMSGQGHMETVKSAKRLDEGVSVLRVPLTQLKLKDLEKMVNREREPKLYEALKARLEAHKDDPAKAFAEPFYKYDKAGNRTQQVKAVRVEQVQKTGVWVRNHNGIADNATMVRVDVFEKGDKYYLVPIYSWQVAKGILPDRAVVAYADEEDWTVIDESFRFKFVLYSNDLIKVQLKKDSFLGYFSGLDRATGAISLREHDLEKSKGKDGMHRIGVKTALSFQKYQIDEMGKEIRPCRLKKRPPVR

SEQ ID NO: 568 - protein, 1082 aa, Neisseria meningitidis
MAAFKPNPINYILGLDIGIASVGWAMVEIDEEENPIRLIDLGVRVFERAEVPKTGDSLAMARRLARSVRRLTRRRAHRLLRARRLLKREGVLQAADFDENGLIKSLPNTPWQLRAAALDRKLTPLEWSAVLLHLIKHRGYLSQRKNEGETADKELGALLKGVADNAHALQTGDFRTPAELALNKFEKECGHIRNQRGDYSHTFSRKDLQAELNLLFEKQKEFGNPHVSGGLKEGIETLLMTQRPALSGDAVQKMLGHCTFEPAEPKAAKNTYTAERFIWLTKLNNLRILEQGSERPLTDTERATLMDEPYRKSKLTYAQARKLLGLEDTAFFKGLRYGKDNAEASTLMEMKAYHAISRALEKEGLKDKKSPLNLSPELQDEIGTAFSLFKTDEDITGRLKDRIQPEILEALLKHISFDKFVQISLKALRRIVPLMEQGKRYDEACAEIYGDHYGKKNTEEKIYLPPIPADEIRNPVVLRALSQARKVINGVVRRYGSPARIHIETAREVGKSFKDRKEIEKRQEENRKDREKAAAKFREYFPNFVGEPKSKDILKLRLYEQQHGKCLYSGKEINLVRLNEKGYVEIDHALPFSRTWDDSFNNKVLVLGSENQNKGNQTPYEYFNGKDNSREWQEFKARVETSRFPRSKKQRILLQKFDEEGFKERNLNDTRYVNRFLCQFVADHILLTGKGKRRVFASNGQITNLLRGFWGLRKVRAENDRHHALDAVVVACSTVAMQQKITRFVRYKEMNAFDGKTIDKETGEVLHQKTHFPQPWEFFAQEVMIRVFGKPDGKPEFEEADTPEKLRTLLAEKLSSRPEAVHEYVTPLFVSRAPNRKMSGQGHMETVKSAKRLDEGVSVLRVPLTQLKLKDLEKMVNREREPKLYEALKARLEAHKDDPAKAFAEPFYKYDKAGNRTQQVKAVRVEQVQKTGVWVRNHNGIADNATMVRVDVFEKGGKYYLVPIYSWQVAKGILPDRAVVQGKDEEDWQLIDDSFNFKFSLHPNDLVEVITKKARMFGYFASCHRGTGNINIRIHDLDHKIGKNGILEGIGVKTALSFQKYQIDELGKEIRPCRLKKRPPVR

SEQ ID NO: 569 - protein, 1081 aa, Neisseria meningitidis
MAAFKPNPINYILGLDIGIASVGWAMVEIDEEENPIRLIDLGVRVFERAEVPKTGDSLAMARRLARSVRRLTRRRAHRLLRARRLLKREGVLQAADFDENGLIKSLPNTPWQLRAAALDRKLTPLEWSAVLLHLIKHRGYLSQRKNEGETADKELGALLKGVADNAHALQTGDFRTPAELALNKFEKESGHIRNQRGDYSHTFSRKDLQAELILLFEKQKEFGNPHVSGGLKEGIETLLMTQRPALSGDAVQKMLGHCTFEPAEPKAAKNTYTAERFIWLTKLNNLRILEQGSERPLTDTERATLMDEPYRKSKLTYAQARKLLGLEDTAFFKGLRYGKDNAEASTLMEMKAYHAISRALEKEGLKDKKSPLNLSPELQDEIGTAFSLFKTDEDITGRLKDRVQPEILEALLKHISFDKFVQISLKALRRIVPLMEQGKRYDEACAEIYGDHYGKKNTEEEIYLPPITADEIRNPVVLRALSQARKVINAVVRRYGSPARIHIETAREVGKSFKDRKEIEKRQEENRKDREKAAAKFREYFPNFVGEPKSKDILKLRLYEQQHGKCLYSGKEINLVRLNEKGYVEIDHALPFSRTWDDSFNNKVLVLGSENQNKGNQTPYEYFNGKENSREWQEFKARVETSRFPRSKKQRILLQKFDEDGFKERNLNDTRYVNRFLCQFVADRMRLTGKGKKRVFASNGQITNLLRGFWGLHKVRAENDRHHALDAVVVACSTIAMQQKITRFVRYKEMNAFDGKTIDKETGEVLHQKAHFPQPWEFFAQEVMIRVFGKPDGKPEFEEADTPEKLRTLLAEKLSSRPEAVHEYVTPLFVSRAPNRKMSGQGHMETVKSAKRLDEGISVLRVPLTQLKLKDLEKMVNRAREPKLYEALKARLEAHKDDPAKAFAEPFYKYDKAGNRTQQVKAVRVEQVQKTGVWVRNHNGIADNATMVRVDVFEKAGKYYLVPIYSWQVAKGILPDRAVVAYADEEDWTVIDESFRFKFVLYSNDLIKVQLKKDSFLGYFSGLDRATGAISLREHDLEKSKGKDGMHRIGVKTALSFQKYQIDEMGKEIRPCRLKKRPPVR

SEQ ID NO: 570 - protein, 1082 aa, Neisseria meningitidis
MAAFKPNPINYILGLDIGIASVGWAMVEIDEEENPIRLIDLGVRVFERAEVPKTGDSLAMARRLARSVRRLTRRRAHRLLRARRLLKREGVLQAADFDENGLIKSLPNTPWQLRAAALDRKLTPLEWSAVLLHLIKHRGYLSQRKNEGETADKELGALLKGVANNAHALQTGDFRTPAELALNKFEKESGHIRNQRGDYSHTFSRKDLQAELILLFEKQKEFGNPHVSGGLKEGIETLLMTQRPALSGDAVQKMLGHCTFEPAEPKAAKNTYTAERFIWLTKLNNLRILEQGSERPLTDTERATLMDEPYRKSKLTYAQARKLLGLEDTAFFKGLRYGKDNAEASTLMEMKAYHAISRALEKEGLKDKKSPLNLSSELQDEIGTAFSLFKTDEDITGRLKDRVQPEILEALLKHISFDKFVQISLKALRRIVPLMEQGKRYDEACAEIYGDHYGKKNTEEKIYLPPIPADKIRNPVVLRALSQARKVINGVVRRYGSPARIHIETAREVGKSFKDRKEIEKRQEENRKDREKAAAKFREYFPNFVGEPKSKDILKLRLYEQQHGKCLYSGKEINLVRLNEKGYVEIDHALPFSRTWDDSFNNKVLVLGSENQNKGNQTPYEYFNGKDNSREWQEFKARVETSRFPRSKKQRILLQKFDEDGFKECNLNDTRYVNRFLCQFVADHILLTGKGKRRVFASNGQITNLLRGFWGLRKVRAENDRHHALDAVVVACSTVAMQQKITRFVRYKEMNAFDGKTIDKETGKVLHQKTHFPQPWEFFAQEVMIRVFGKPDGKPEFEEADTPEKLRTLLAEKLSSRPEAVHEYVTPLFVSRAPNRKMSGAHKDTLRSAKRFVKHNEKISVKRVWLTEIKLADLENMVNYKNGREIELYEALKARLEAYGGNAKQAFDPKDNPFYKKGGQLVKAVRVEKTQESGVLLNKKNAYTIADNGDMVRVDVFCKVDKKGKNQYFIVPIYAWQVAENILPDIDCKGYRIDDSYTFCFSLHKYDLIAFQKDEKSKVEFAYYINCDSSNGRFYLAWHDKGSKEQQFRISTQNLVLIQKYQVNELGKEIRPCRLKKRPPVR

SEQ ID NO: 571 - protein, 1082 aa, Neisseria meningitidis
MAAFKPNPINYILGLDIGIASVGWAMVEIDEEENPIRLIDLGVRVFERAEVPKTGDSLAMARRLARSVRRLTRRRAHRLLRARRLLKREGVLQAADFDENGLIKSLPNTPWQLRAAALDRKLTPLEWSAVLLHLIKHRGYLSQRKNEGETADKELGALLKGVANNAHALQTGDFRTPAELALNKFEKESGHIRNQRGDYSHTFSRKDLQAELILLFEKQKEFGNPHVSGGLKEGIETLLMTQRPALSGDAVQKMLGHCTFEPAEPKAAKNTYTAERFIWLTKLNNLRILEQGSERPLTDTERATLMDEPYRKSKLTYAQARKLLGLEDTAFFKGLRYGKDNAEASTLMEMKAYHAISRALEKEGLKDKKSPLNLSSELQDEIGTAFSLFKTDEDITGRLKDRVQPEILEALLKHISFDKFVQISLKALRRIVPLMEQGKRYDEACAEIYGDHYGKKNTEEKIYLPPIPADEIRNPVVLRALSQARKVINGVVRRYGSPARIHIETAREVGKSFKDRKEIEKRQEENRKDREKAAAKFREYFPNFVGEPKSKDILKLRLYEQQHGKCLYSGKEINLVRLNEKGYVEIDHALPFSRTWDDSFNNKVLVLGSENQNKGNQTPYEYFNGKDNSREWQEFKARVETSRFPRSKKQRILLQKFDEDGFKECNLNDTRYVNRFLCQFVADHILLTGKGKRRVFASNGQITNLLRGFWGLRKVRAENDRHHALDAVVVACSTVAMQQKITRFVRYKEMNAFDGKTIDKETGKVLHQKTHFPQPWEFFAQEVMIRVFGKPDGKPEFEEADTPEKLRTLLAEKLSSRPEAVHEYVTPLFVSRAPNRKMSGAHKDTLRSAKRFVKHNEKISVKRVWLTEIKLADLENMVNYKNGREIELYEALKARLEAYGGNAKQAFDPKDNPFYKKGGQLVKAVRVEKTQESGVLLNKKNAYTIADNGDMVRVDVFCKVDKKGKNQYFIVPIYAWQVAENILPDIDCKGYRIDDSYTFCFSLHKYDLIAFQKDEKSKVEFAYYINCDSSNGRFYLAWHDKGSKEQQFRISTQNLVLIQKYQVNELGKEIRPCRLKKRPPVR

SEQ ID NO: 572 - protein, 1082 aa, Neisseria meningitidis
MAAFKPNPINYILGLDIGIASVGWAMVEIDEEENPIRLIDLGVRVFERAEVPKTGDSLAMARRLARSVRRLTRRRAHRLLRTRRLLKREGVLQAANFDENGLIKSLPNTLWQLRAAALDRKLTPLEWSAVLLHLIKHRGYLSQRKNEGETADKELGALLKGVAGNAHALQTGDFRTPAELALNKFEKESGHIRNQRGDYSHTFSRKDLQAELNLLFEKQKEFGNPHISDGLKEGIETLLMTQRPALSGDAVQKMLGHCTFEPTEPKAAKNTYTTERFIWLTKLNNLRILEQGSERPLTDTERATLMDEPYRKSKLTYAQARKLLELDDIAFFKGLRYGKDNAEASTLMEMKAYHAISRALEKEGLKDKKSPLNLSPELQDEIGTAFSLFKTDEDITGRLKDRIQPEILEALLKHINFDKFVQISLKALRRIVPLMEQGKRYDEACAEIYGDHYGKKNTEEKIDLPPIPADEIHNPVVLRALSQARKVINGVVRRYGSPARIHIETAREVGKSFKDRKEIEKRQEENRKDREKAAAKFREYFPNFVGEPKSKDILKLRLYEQQHGKCLYSGKEINLGRLNEKGYVEIDHALPFSRTWDDSFNNKVLVLGSENQNKGNQTPYEYFNGKDNSREWQEFKARVETSRFPRSKKQRILLQKFDEDGFKERNLNDTRYVNRFLCQFVADRMRLTGKGKKRVFASNGQITNLLRGFWGLRKVRAENDRHHALDAVVVACSTVAMQQKITRFVRYKEMNAFDGKTIDKETGEVLHQKTHFPQPWEFFAQEVMIRVFGKPDGKPEFEEADTPEKLRTLLTEKLSSRPEAVHEYVTPLFVSRAPNRKMSGQGHMETVKSAKRLDEGISVLRVPLTQLKLKDLEKMVNREREPKLYEALKARLEAHKDDPAKAFAEPFYKYDKAGNRTQQVKAMRVEQVQKTGVWVRNHNGIADNATMVRVDVFEKGDKYYLVPIYSWQVAKGILPDRAVVQGKDEEDWQLIDDSFNFKFSLHPNDLVEVITKKARMFGYFASCHRGTGNINIRIHDLDHKIGKNGILEGIGVKTALSFQKYQIDELGKEIRPCRLKKRPPVR

SEQ ID NO: 573 - protein, 1082 aa, Neisseria meningitidis
MAAFKPNPINYILGLDIGIASVGWAMVEIDEEENPIRLIDLSVRVFERAEVPKTGDSLAMARRLARSVRRLTRRRAHRLLRARRLLKREGVLQAADFDENGLIKSLPNTPWQLRAAALDRKLTPLEWSAVLLHLIKHRGYLSQRKNEGETADKELGALLKGVADNAHALQTGDFRTPAELALNKFEKESGHIRNQRGDYSHTFSRKDLQAELILLFEKQKEFGNPHVSGGLKEGIETLLMTQRPALSGDAVQKMLGHCTFEPAEPKAAKNTYTAERFVWLTKLNNLRILEQGSERPLTDTERATLMDEPYRKSKLTYAQARKLLGLEDTAFFKGLRYGKDNAEASTLMEMKAYHAISRALEKEGLKDKKSPLRLSPELQDEIGTAFSLFKTDEDITGRLKDRVQPEILEALLKHISFDKFVQISLKALRRIVPLMEQGKRYDEACAEIYGDHYGKKNAEEKIYLPPIPADEIRNPVVLRALSQARKVINGVVRRYGSPARIHIETAREVGKSFKDRKEIEKRQEENRKDREKAAAKFREYFPNFVGEPKSKDILKLRLYEQQHGKCLYSGKEINLGRLNEKGYVEIDHALPFSRTWDDSFNNKVLVLGSENQNKGNQTPYEYFNGKDNSREWQEFKARVETSRFPRSKKQRILLQKFDEDGFKERNLNDTRYVNRFLCQFVADRMRLTGKGKKRVFASNGQITNLLRGFWGLRKVRAENDRHHALDAVVVACSTVAMQQKITRFVRYKEMNAFDGKTIDKETGEVLHQKTHFPQPWEFFAQEVMIRVFGKPDGKPEFEEADTPEKLRTLLAEKLSSRPEAVHEYVTPLFVSRAPNRKMSGQGHMETVKSAKRLDEGVSVLRVPLTQLKLKDLEKMVNREREPKLYEALKARLEAHKDDPAKAFAEPFYKYDKAGNRTQQVKAVRVEQVQKTGVWVRNHNGIADNATMVRVDVFEKGDKYYLVPIYSWQVAKGILPDRAVVQGKDEEDWQLIDDSFNFKFSLHPNDLVEVITKKARMFGYFASCHRGTGNINIRIHDLDHKIGKNGILEGIGVKTALSFQKYQIDELGKEIRPCRLKKRPPVR

SEQ ID NO: 574 - protein, 1082 aa, Neisseria meningitidis
MAAFKPNSINYILGLDIGIASVGWAMVEIDEEENPIRLIDLGVRVFERAEVPKTGDSLAMARRLARSVRRLTRRRAHRLLRTRRLLKREGVLQAANFDENGLIKSLPNTPWQLRAAALDRKLTPLEWSAVLLHLIKHRGYLSQRKNEGETADKELGALLKGVAGNAHALQTGDFRTPAELALNKFEKESGHIRNQRSDYSHTFSRKDLQAELILLFEKQKEFGNPHVSGGLKEGIETLLMTQRPALSGDAVQKMLGHCTFEPAEPKAAKNTYTAERFIWLTKLNNLRILEQGSERPLTDTERATLMDEPYRKSKLTYAQARKLLGLEDTAFFKGLRYGKDNAEASTLMEMKAYHAISRALEKEGLKDKKSPLNLSPELQDEIGTAFSLFKTDEDITGRLKDRIQPEILEALLKHISFDKFVQISLKALRRIVPLMEQGKRYDEACAEIYGDHYGKKNTEEKIYLPPIPADEIRNPVVLRALSQARKVINGVVRRYGSPARIHIETAREVGKSFKDRKEIEKRQEENRKDREKAAAKFREYFPNFVGEPKSKDILKLRLYEQQHGKCLYSGKEINLGRLNEKGYVEIDHALPFSRTWDDSFNNKVLVLGSENQNKGNQTPYEYFNGKDNSREWQEFKARVETSRFPRSKKQRILLQKFDEDGFKERNLNDTRYVNRFLCQFVADRMRLTGKGKKRVFASNGQITNLLRGFWGLRKVRAENDRHHALDAVVVACSTVAMQQKITRFVRYKEMNAFDGKTIDKETGEVLHQKTHFPQPWEFFAQEVMIRVFGKPDGKPEFEEADTLEKLRTLLAEKLSSRPEAVHEYVTPLFVSRAPNRKMSGQGHMETVKSAKRLDEGVSVLRVPLTQLKLKDLEKMVNREREPKLYEALKARLEAHKDDPAKAFAEPFYKYDKAGNRTQQVKAVRVEQVQKTGVWVRNHNGIADNATMVRVDVFEKGDKYYLVPIYSWQVAKGILPDRAVVQGKDEEDWQLIDDSFNFKFSLHPNDLVEVITKKARMFGYFASCHRGTGNINIRIHDLDHKIGKNGILEGIGVKTALSFQKYQIDELGKEIRPCRLKKRPPVR

SEQ ID NO: 575 - protein, 67 aa, Neisseria meningitidis
MFGYFASCHRGTGNINIRIHDLDHKIGKNGILEGIGVKTALSFQKYQIDELGKEIRPCRLKKRPPVR

SEQ ID NO: 576 - protein, 220 aa, Neisseria mucosa
MRHIFSDGLKEGIETLLMTQRPALSGDAVQKMLGHCTFEPTEPKAAKNTYTAERFIWLTKLNNLRILEQGSERPLTNTERATLMDEPYRKSKLTYAQARKLLGLKDTAFFKGLRYGKDNAEASTLMEMKAYHAISRALEKEGLKDKKSPLNLSPELQDEIGTAFSLFKTDEDITGRLKTELTPASNKTLSRPFTVKSASNGSTSAPWLPSTKWFLHFKPA

SEQ ID NO: 577 - protein, 392 aa, Neisseria sp.
MAPFTLKPLNYILGLDIGIASVGWAVVETDSDVLPYRLIDVGVRTFDRAEVPKTGESPAAARRLARSVRRMIRRRAHRMLRARRLLKREGMLQAADFDAHGLVENLPVNPWQLRVDALSRKLMPLEWAAVLLHMVKHRGYLSQRKNERNSSDKELGALLSGVAANSEALQGGDFRTPAELAVNKFEKESGHIRNQRGDYSHTFNRKDVQAELVLLFEKQKEYGNPYISDGLLTGVEDLLMTQRAALSGDAVQKMLGRCTFEPEEYKAAKNTYSAERFVWLTKLNNLRILDQGSERPLTDSERAKLMDEPYKKTKLTYAQVRRLLELDDTAFFKGLRYSKDNAESATLMEMKAYHSISGALEKAGLKNKKIAAGLIARIAGRNRRGVFAIQNR

SEQ ID NO: 578 - protein, 701 aa, Neisseria sp.
MQDEIGEAFSLFKTDEDIRGRLKGKLPDEQLDALLEYVSFDKFVQLSLKALRKILPLMEQGKRYDEACAEIYGDHYGIKDDKQAQFLPPVSADEIRNPVVLRALSQARKVVNAVVRRYGSPARVHIETAREVGKSFLDRKKIEKRQEENRKDRERSIAKFREYFPNFVGEPKAKDILKMRLYEQQQGQCLYSGKAIDLRRLNEKGYVEIDHALPFSRTWDDSFNNKVLVLAGENQNKRNQTPFEWLGGDEKRWREFTARVEHCRFPRSKKQRILMQKLDEKDFKERNLNDTRYVNRFLCNFIAQNMLLTGEDKNRVFASNGQITNLLRGMWGLKKVRESNDRHHALDAVVVACSTVAMQQKITNYVRQKEMNVFDGEMVDKTTGEVSRLHFPQPWDFFRQEVMMRVFGKPDTPSENNEEADTPEKLRALLADKLSSRPEAVHEAVTPLFVSRAPSRKMSGQGHMETIKSAKRLSEGKSVLRVPLTQLTPKLLENMVNREREPQLYEDLLGRLNAHGGDPAKAFAAPFFKRDKAGNPTQQVKAVRVEDVQKSGVIVREGNGVADNATMVRVDVFEKGGKYYLMPIYTWQAAKGILPNKAVIAHTDEANWQEMDTSFTFKFALYPNDLVLASLKKETYFGYFAGLDRSTGNISLRVHDLEKSKGKDGVYRIGVKTALSFQKYQVDELGKTIRPCRLKKRPPVR

SEQ ID NO: 579 - protein, 1089 aa, Neisseria sp.
MTAFKPNPLNYILGLDIGIASVGWAMVEIDDKENPVRLIDLGVRVFERAEMPKTGDSLAAARRLARSVRRLTRRRAHRLLRARRLLKHEGVLKPEDFDENGLVKPLPYIPKQPRNTPWQLRAAALDRKLTPLEWAAVLLHLVKHRGYLSQRKNEGETDDKELGALLKGVADNTHALQAGNFRTPAELALNKFEKESGHIRNQRGDYSHTFSRKDLQAELVLLFEKQKEFGNPYVSDDLKNGIENLLMTQRPALSGDAIQKMLGHCTFEPAEPKAAKNTYTAERFIWLTKLNNLRILNQGNERPLTDAERTTLMDEPYKKSKLTYAQARKLLDLDDTAFFKGLRYGKDNAESATLMEMKAYHAISRALEKEGLKDKKSPLSLSPELQDEIGTAFSLFKTDEEITGRLKGCLQPEILDALLKHISFDKFVQISLKALRRIVPLMEQGKRYDEACAEIYGDHHGRRNSEETLYLPPIPADEIRNPVVLRALSQARKVINGVGRRYGSPARIHIETAREVGKSFKDRKEIEKRQEENRKDREKAAAEFQEYFPNFVGEPKSKDILKLRLYRQQNCKCLYSGKEINLGRLNEKGYVEIDHALPFSRTWDDSFNNKVLVLGSENQNKGNRTPYEYLNGKDNSREWQEFKARVETSRFPHSKKQRILLQKFDEEGFKERNLNDTRYVNRFLCKFVADHMQLTGKGKRRVFASNGQITNLLRGFWGLRKVRAENDRHHALDAVVVACSTVAMQQRITRFVRYKEMNAFDGKTVDKETGEVLHQKTHFPQPWEFFAQEVMIRVFGKPDGKPELEEADTPEKLRALLAEKLSSRPEAVHEYVAPLFVSRAPNRKMSGQGHMETIKSPKRLDEGISVVRVPLTQLKLKDLEKMVNREREPKLYEALKARLEAHKDDPAKAFAEPFYKQDKAGNRTQQVKAVRIEQVQKTGVWVRNQNGIADNATMVRVDVFEKGGKYYLVPIYSWQVAKGILPDKAIIAFKDEEEWQLIDDSFNFKFPLHPNDLVEVITKKARIFGYFASCHRGTGNINIRIHDLDNKVGKNGILEGIGVKTALSFQKYQIDELGKEIRPCRLKKRPPVR

SEQ ID NO: 580 - protein, 1097 aa, Neisseria wadsworthii
MKKQPQRYILGLDLGIASVGWALILVDGAENPVGLLDCGVRTFERAEVPKTGDSLALARRQARSVRRLIRRRAHRLLRLRRLLKREGILSAADFNSDGLPNLPIDAWQLRVAGLERKLTNQEWAAVLLHLVKHRGYLSQRKSETQTENKELGRLLAGVAENSKLLSESSEQYRTPAELAVKLFAEQSGHLRNKGGEYTHTFNRLDLQKELHLLFERQYALGNPFASAELQSKVDELLMTQRSALQGEAVLKMLGKCTFEPSEYKAAKNTYSAERFIWLTKLNNLRILYNGEERALDEGDRKKLLDEPYKKAKLTYKQVRSILNLPESAVFKGLRYGKDSDGLKAENGTLMEMKAYHKIRTILDKAGLKGEWENRIRNPEILDKIGTAFSLYKTDEDIQAALADLRLPENVLDALLAGLNFDKFIQLSLKALRNILPLMERGIRYDEACKEVYGDHRALAESKNQVLLPPIPADEIRNPVVLRTLTQARKVINAIIRRYGSPQRVHIETARELGKSKQERDKIDRKNKENQNDRNRLASDIRKHFNFEPTPKDILKLRLYEQQHGKCLYSDLREEKGECLYTGNVIELHRLFEDGYVEIDHALPLSRTWDNSLNNKVLVLKSSNQNKGNKTPYEWLDGANNSRRWREFQARVQGCHFPYVKKQRIQTAKLDSKAEQGFLERNLNDTRYISKFMCQFITANLRLAETSNALMEEVAGENPYWKERKRQRVFAPSGSIIALLRGLWGLKKVREDNDRHHALDAIVVACSTVSMQQKITKAMQRRETLETVDSETGEVKTRIPQPWDFFRQEVMIRVFSDSPREELAEKLNSRPEALHDFVSPLFVSRAPNRKMTGQGHLETVKSAKRLSENISVVRKPLTALKLKDIENIVGYPDREPALYQALRERLLAHKDDPVKAFADKPFYKPAKDGGQGSLVKAVRIIENTKHGLKIRNGITDTNGDMVRTDVYQKTDKKGKRQYFIVPVYAWQVEKNELPTVDCKGYEIDDNYEFCFSLYKYDLIEIQNPNDINQELRAYYINCDSSDGRFWLAYHDKSAKEQQFRISTQNQPIIKKYQVDTLGKEIRLCKAEKRTALNGKKKK

SEQ ID NO: 581 - protein, 1426 aa, Niabella soli
MPRKNILGLDLGTTSIGFAKIIEDDDYQCSSVELIGVRVNPLTTDEQTNFEKGKPVSVNADRTLKRGMRRNLDRYQLRRDYLIEILRTHHIITADTKLAEDGKNTTHTTYALRALAATAEIPLEAFVRVLLAINKKRGYKSSRKAKNEDEGQLIDGMAIARRLYEESLTPGQFSYQLLKEGKKYLPDFYRSDLNTELNKVWNFQKQFYPEILTDEFKRHLEGKGQRATAVAFWGQHGFSMAENKGSREEKKLHAYKWRSEAAHKQLTKEEVAFVITEINNDLNKSSGYLGAISDRSKELFFNKQTVGQYLHQQLKENPHTRLKGQVFYRQDYLDEFETIWEMQAKFYSALTLELKEEVRDVVIFYQRKLKSQMGLISLCEFESKEIEIEKNGEKAKKRIGLRVAPKSSPLFQEFKIWQVLNNLEFRNKKTKEVFVPEMAAKQQLFDELNIKGNLLASEAIKILGYKTKDWEANYHTLEGNRTNKSLYDAWLKILELEGYDENLLKLSGSDDIDVSKIEKPALEIRQMVLAVFEVLGISGAILDFDAEADGKAFEQQPAYQLWHLLYSAEDDGKKYSQEDIFTYGHDNIGLKKKLCEKFGFRPEHTKILVNVVFSDDYGNLSSKAMRRIYPFIKELTYDKACAEAGYRHSAASLTKEEIAARPLQNRLDLLKKNELRSPVVEKILNQMVNVVNTLVDDENQNRKARGLSEDFHFDEIRIELARELKKNAKERAEMTTNINTAKQSHEKIIRILQTEFGVPNPSRNDIVRYKLYEELKNNGYKDLYTNTYISRDILFSKQIDVDHIIPQMSLFDDSFSNKTVVFRKDNQDKGNKTAYDYILGKYGEQALEEYISRITSLFELGKKNKEEGIGKAKFQKLQKRLVDIGDGFIERDLRESQYIAKKANNMLYAICRSVVSTSGEITARLREDWDLVNVMQEINLPKFRALGLTEMVEKKDGAQKERITDWTKRNDHRHHAMDALAIAFTRHSHIQYLNHLNARKDEANKWHPVVSKIEEKETVLIYDDLGNRKRKFKAPMPNFREVVKEHLENVLISHKAKNKVVTKNKNKIKTVRGEKVKTELTPRGQLHKETIYGRYRYYESKEEKIGPKFDAEMIGMVTNPQYKKLLLERLAANGNDPKKAFWGKNALNKNPLYVDEARQELLPEKILLRWLNDDYSIRKDVTPENLKDIKTIEKILDKGVKKILLKRLADFGNDPKKAFSDLDKNPIWQNEAKRIAIKRVTISGIKNAAPLHHKKDHLGNDILDEKGKQIPSSFVSTGNNHHVAIYRDAEGNLQERVVSLFDAVQLVNGGEPVIDKEYNKGIGWQFLFTMKQNEMFVFPDEKTGFNPREVDLLSSGNRKLISPNLFRVQKLASKNYFFRHHLETSVEEKKELKNIAYKPQLGLNALSNIVKVRINHIGEIVSVGEY

SEQ ID NO: 582 - protein, 79 aa, Nitritalea halalkaliphila
MPLRLPERVYKMISSTGAECHFLPVNVSSLIKGYDAKSKLGEFGSQNKQEVTSDSFIRVKERCYKLEINRLGIPLNRLK

SEQ ID NO: 583 - protein, 1498 aa, Odoribacter laneus
METTLGIDLGTNSIGLALVDQEEHQILYSGVRIFPEGINKDTIGLGEKEESRNATRRAKRQMRRQYFRKKLRKAKLLELLIAYDMCPLKPEDVRRWKNWDKQQKSTVRQFPDTPAFREWLKQNPYELRKQAVTEDVTRPELGRILYQMIQRRGFLSSRKGKEEGKIFTGKDRMVGIDETRKNLQKQTLGAYLYDIAPKNGEKYRFRTERVRARYTLRDMYIREFEIIWQRQAGHLGLAHEQATRKKNIFLEGSATNVRNSKLITHLQAKYGRGHVLIEDTRITVTFQLPLKEVLGGKIEIEEEQLKFKSNESVLFWQRPLRSQKSLLSKCVFEGRNFYDPVHQKWIIAGPTPAPLSHPEFEEFRAYQFINNIIYGKNEHLTAIQREAVFELMCTESKDFNFEKIPKHLKLFEKFNFDDTTKVPACTTISQLRKLFPHPVWEEKREEIWHCFYFYDDNTLLFEKLQKDYALQTNDLEKIKKIRLSESYGNVSLKAIRRINPYLKKGYAYSTAVLLGGIRNSFGKRFEYFKEYEPEIEKAVCRILKEKNAEGEVIRKIKDYLVHNRFGFAKNDRAFQKLYHHSQAITTQAQKERLPETGNLRNPIVQQGLNELRRTVNKLLATCREKYGPSFKFDHIHVEMGRELRSSKTEREKQSRQIRENEKKNEAAKVKLAEYGLKAYRDNIQKYLLYKEIEEKGGTVCCPYTGKTLNISHTLGSDNSVQIEHIIPYSISLDDSLANKTLCDATFNREKGELTPYDFYQKDPSPEKWGASSWEEIEDRAFRLLPYAKAQRFIRRKPQESNEFISRQLNDTRYISKKAVEYLSAICSDVKAFPGQLTAELRHLWGLNNILQSAPDITFPLPVSATENHREYYVITNEQNEVIRLFPKQGETPRTEKGELLLTGEVERKVFRCKGMQEFQTDVSDGKYWRRIKLSSSVTWSPLFAPKPISADGQIVLKGRIEKGVFVCNQLKQKLKTGLPDGSYWISLPVISQTFKEGESVNNSKLTSQQVQLFGRVREGIFRCHNYQCPASGADGNFWCTLDTDTAQPAFTPIKNAPPGVGGGQIILTGDVDDKGIFHADDDLHYELPASLPKGKYYGIFTVESCDPTLIPIELSAPKTSKGENLIEGNIWVDEHTGEVRFDPKKNREDQRHHAIDAIVIALSSQSLFQRLSTYNARRENKKRGLDSTEHFPSPWPGFAQDVRQSVVPLLVSYKQNPKTLCKISKTLYKDGKKIHSCGNAVRGQLHKETVYGQRTAPGATEKSYHIRKDIRELKTSKHIGKVVDITIRQMLLKHLQENYHIDITQEFNIPSNAFFKEGVYRIFLPNKHGEPVPIKKIRMKEELGNAERLKDNINQYVNPRNNHHVMIYQDADGNLKEEIVSFWSVIERQNQGQPIYQLPREGRNIVSILQINDTFLIGLKEEEPEVYRNDLSTLSKHLYRVQKLSGMYYTFRHHLASTLNNEREEFRIQSLEAWKRANPVKVQIDEIGRITFLNGPLC

SEQ ID NO: 584 - protein, 1389 aa, Oenococcus kitaharae; identical to SEQ ID NO: 241

SEQ ID NO: 585 - protein, 1535 aa, Ornithobacterium rhinotracheale
MNTILGLDLGTNSIGWALIKVLNDKTRLPLEIIDLGVVVIPTDQRTLDKFSKGESISKTAERTKQKGVRKLYERKKLRRERLHRVLNILGFLPEHYSKKIDFKKHLGQFFGNSQPKISYVENDHGKHEFIFMDSYREMLKEFSKHNIKNVPYDWTIYYLRKKALSQKISKEELAWVILNFNKKRGYYQFRDDNADENKENKIEKYYALKVTNVKKEDAQNYTITLENGWIYKNKSKISLLDWVGSTKEFISTEKFDNKGNIIKKKNGEDDRTLKLVDSEKDWIAIKKSTEDRIENYGKTVGTYLYEHLLKDPNQKLNGELINIIDRKFYKNELKQILEKQKEFHPELLNEDLFQKSIIELYPKNSTRQKELKNKDLCYLLIDDVIYYQRDLKKKNSTINKCSFESREYYLNGEKQIQKINCIAKSKPLYQEFRTLQFIKNLKVYEIIDGLEKDITSKLLPDFETKEHFFEWLNDKEKIDQLQLLSYKCFDLHDNVKNDLIAKGIKRPTEKAIRTELLEKYRWNYSKDNDRNFLLNETRFKILKYLKKVDKKLTLTNEQIESLWLLLYSAKDERELKNGLQKFSEKNKLPKKFSDIFISFPPFKKEYGAYSEKALKKLLSLVRFGKYWSFNKIDNNIQNKIMNILNGEVDDSISDRVREKTILLQDKNDFQDLPLWLASYVAYNRFSEVSEIKYWDSPDKIEFLKQHSIGNPIVEKIINETLKLIKDIWVIHGKSCKNFFSEIHIELSREIKSSSKKRAQITNNNTKNQKLNNLIKSLLIEMASDTKYENVTPYSPSQQEILKIYDEGIYSKEENSEKIKEINKIRNNNKISKSDITKYKLWLEQGYISPYTGKIIPLTKLFTAKYQKEHIIPQTKFFDDSFNNKVICEAEVNKLKDNSLAMNFIKAKGGKAVKLSDGETVTILNQEEYKQLVRTSFKKNSIKLRNLLLEEIPDTFTKRQLNDTKYISKLVLSLLSNIVREKGELESTAKRIVSTNGQITSILRNDWGLNNIWNKLITPRFERLNNINKNKIYGNWENKKGKNVFQINYLNDNLSTLNTKRIDHRHHALDALIVACTTRNHINFLNNQYAKSRNQRHDLRAKLKRRETITTEGSKKQVFKDFIKPWESFTQDALKKLETTIVNFKVNKRIINKTINWYKKWEKQKDGTYKKIQKKQTKGDAWAIRKPLHIDTIYGIVCKKLPLKSALENYKNIIDENLKHKIKELKEVNKFDNNQIINFFKECNFIFEDNNIQKVEVYDFKDNRDKTILSSSRQLIDESFTPKKIGKVLDPTIRNILLKHLNSTKYNNKFDSDGNPIKPEKLAFSPEGLKDLNKNIKHLNNNKEHQPIKRVKLFETLGNKIKVGYTQQKNKKFAETATGTNLFLGIYSDNNKRDFKTIPLILAIQREKEGLNPCPDTDEKGNQLLFSLSPNELVFVPNNEERKNPNLVDFENLSKDQIDRIYKFVSCTGSEAYFVPSRTAKPIIENENGTNNKSQRIIEFNEKTSIKNEKNEPVLIKTICWKIEVNRLGKIIKVIK

SEQ ID NO: 586 - protein, 103 aa, Parabacteroides merdae
MIVYRLFYRFLFKATKLVNFVIHKELKRQIARTGKIKFHSGGCGCQSGNYKMQNFEKGKSITTNADRTLKRSMRRNLYRCKLRRDVLIELLKKVGFIPEKQWK

SEQ ID NO: 587 - protein, 82 aa, Parabacteroides merdae
MSIWKLQYPPLDLKIYNKFLVYSRVNPLTVDEMQNFEKGKSITTNADRTLKRSMRRNLQRYKLRRDVLIELLKKVGFMSEKQ

SEQ ID NO: 588 - protein, 84 aa, Parabacteroides merdae
MSIWKLQYPPLDLKIYNKFLVYSRVNPLTVDEMQNFEKGKSITTNADRTLKRSMRRNLYRCKLRRDVLIELLKKVGFIPEKQWK

SEQ ID NO: 589 - protein, 398 aa, Pasteurella bettyae
MLANENQNKGNLTPYEWLDGKNNSKRWQDFVARVQTCCFSHRKKQHILSHKLDEKSFIERNLNDTRYVARFLCNFIADNMLLTGKGKRKVFASNGQITALLRGRWGLQKVRDDNDRHHALDAVVIACSTVAMQQKITRFVKYEEGNVFSGERIDRETGEIIPLYFPTPWKFFKENVEIRIFSENPKLELENRLPDYPQYNHEFVQPLFVSRMPTRKMTGQGHMETIKSAKRLDEGISVLKVPLTQLKLADLENMVNRERELALYEALKERLELFGNDPAKAFIEPFYKKGGALVKAVRVKKVQKSGVLVRDGNGVADNALMVRVDVFTKGGKYFLVPIYTWQVAKGILPNKAVTANIDEIDWLEMDESYQFIFTMYPNDLVKVKLKKEEFFGYYGGLD

SEQ ID NO: 590 - protein, 610 aa, Pasteurella bettyae
MNMLKPLNYILGLDLGIGSVGWAVVEIDEQGNPLRLIDVGVRTFERAEVAKTGESLALARRLARSSRRLVKRRAARIKKAKRLLKAENILLSVDEILPNDVWQLRVKGLDHKLERQEWAAVLLHLLKRRGYLSQRKNESKSENKELGALLSGVVTNHQILQTDEYRTPAEIAVHKFQAEDGHIRNQRGDYTHTFSRLDLLAEMELLFQRQTELGNLHTSSKLLENLTALLMWQKPALAGEAILKMLGKCTFEPTEYKAAKNSYSAERFVWLTKLNNLRILEQGAERALTDSERFVLLDQPYEKAKLTYAQVRTLLKLSDEAIFKGVRYQGEDKKTVESKTTLMEMKAYHQIRKALDGADLKDEWNTLKNDSALLDEIGTAFSLYKTDDDISHYLGGKLSEKVLNVLLENLNFDKFIQLSLKALQKILPLMLQGQRYDEAVSAVYGDHYGKKSAESCRLLPAIPANEIHNPVVLRTLTQARKVINAVVRLYGSPARIHIETGRKVGKSYQDRKKLEKQQEENREQRESAVKKFKEYFPNFVGEPKGKDILKLRLYELQQSKCLYSGKSFDPNRLLEKGYVEVDHALPFSRTWDDSFNNKVCLPMKTRIKAI

SEQ ID NO: 591 - protein, 199 aa, Pasteurella multocida
MACATPSMQQKITRFIRFKEVHPYKIENRYEMVDQESGEIISPHFPEPWAYFRQEVNIRVFDNHPDTVLKEMLPDRPQANHQFVQPLFVSRAPTRKMSGQGHMETIKSAKRLAEGISVLRIPLTQLKPNLLENMVNKEREPALYAGLKARLAEFNQDPAKAFTTPFYKQGGQQVKAIRVEQVQKSGVLVRENNGVADNA

SEQ ID NO: 592 - protein, 63 aa, Pasteurella multocida
MQTTNLSYILGLDLGIASVGWAVVEINENEDPIGLIDVGVRIFERAEVPKTGESLALSRRLAR

SEQ ID NO: 593 - protein, 1058 aa, Pasteurella multocida
MQTTNLSYILGLDLGIASVGWAVVEINENEDPIGLIDVGVRIFERAEVPKTGESLALSRRLARSTRRLIRRRAHRLLLAKRFLKREGILSTTDLEKGLPNQAWELRVAGLERRLSAIEWGAVLLHLIKHRGYLSKRKNESQTNNKELGALLSGVAQNHQLLQSDDYRTPAELALKKFAKEEGHIRNQRGAYTHTFNRLDLLAELNLLFAQQHQFGNPHCKEHIQQYMTELLMWQKPALSGEAILKMLGKCTHEKNEFKAAKHTYSAERFVWLTKLNNLRILEDGAERALNEEERQLLINHPYEKSKLTYAQVRKLLGLSEQAIFKHLRYSKESAESATFMELKAWHAIRKALENQGLKDTWQDLAKKPDLLDEIGTAFSLYKTDEDIQQYLEGKLPDSVINALLVSLNFDKFIELSLKSLRKILPLMEQGKRYDQACHEIYGHHYGEKNQQISQLLPVIPTQEIRNPVVLRTLSQARKVINAIIRQYGSPARVHIETGRELGKSFKERREIQKQQEDNRTKRESAVQKFKELFSDFSSEPKSKDILKFRLYEQQHGKCLYSGKEINIHRLNEKGYVEIDHALPFSRTWDDSFNNKVLVLASENQNKGNQTPYEWLQGKINSERWKNFVALVLGSQCSAAKKQRLLTQVIDDNKFIDRNLNDTRYIARFLSNYIQENLLLVGKNKKNVFTPNGQITALLRSRWGLIKVRENNDRHHALDAIVVACATPSMQQKITRFIRFKEVHPYKIENRYEMVDQESGEIISPHFPEPWAYFRQEVNIRVFDNHPDTVLKEMLPDRPQANHQFVQPLFVSRAPTRKMSGQGHMETIKSAKRLAEGISVLRIPLTQLKPNLLENMVNKEREPALYVGLKARLAEFNQDPAKAFATPFYKQGGQQVKAIRVELVQKSGVLVRQGNGVADNAPGSIVRTDVFIKNNKFFLVPIYTWQVAKGILPNKAIVAHKNEDEWEEMDEGAKFKFSIFPNDLIELRTKTECFLGYYIGPDRHNGSISLREHDSEISKGNAGVYRVGVKLALSLEKYHIDELGKNRRICRPHQRRPVR

SEQ ID NO: 594 - protein, 1056 aa, Pasteurella multocida
MQTTNLSYILGLDLGIASVGWAVVEINENEDPIGLIDVGVRIFERAEVPKTGESLALSRRLARSTRRLIRRRARRLLLAKRFLKREGILSTTDLEKGLPNQAWELRVAGLERRLSAIEWGAVLLHLIKHRGYLSKRKNESQTNNKELGALLSGVAQNHQLLQSDDYRTPAELALKKFAKEEGHIRNQRGAYTHTFNRLDLLAELNLLFAQQHQFGNPHCKEHIQQYMTELLMWQKPALSGEAILKMLGKCTHEKNEFKAAKHTYSAERFVWLTKLNNLRILEDGAERALNEEERQLLINHPYEKSKLTYAQVRKLLGLSEQAIFKHLRYSKENAESATFMELKAWHAIRKALENQGLKDTWQDLAKKPDLLDEIGTAFSLYKTDEDIQQYLTNKVPNSVINALLVFLNFDKFIELALKSLRKILPLMEQGKRYDQACREIYGHHYGEANQKTSQLLPAIPAQEIRNPVVLRTLSQARKVINAIIRQYGSPARVHIETGRELGKSFKERREIQKQQEDNRTKRESAVQKFKELFSDFSSEPKSKDILKFRLYEQQHGKCLYSGKEINIHRLNEKGYVEIDHALPFSRTWDDSFNNKVLVLASENQNKGNQTPYEWLQGKINSERWKNFVALVLGSQCSAAKKQRLLTQVIDDNKFIDRNLNDTRYIARFLSNYIQENLLLVGKNKKNVFTPNGQITALLRSRWGLIKIRENNDRHHALDAIVVACATPSMQQKITRFIRFKEVHPYKIENRYEMVDQESGEIISPHFPEPWAYFRQEVNIRVFDNHPDTVLKEMLPDRPQANHQFVQPLFVSRAPTRKMSGQGHMETIKSAKRLAEGISVLRIPLTQLKPNLLENMVNKEREPALYAGLKARLAEFNQDPAKAFTTPFYKQGGQQVKAIRVEQVQKSGVLVRENNGVADNASIVRTDVFIKNNKFFLVPIYTWQVAKGILPNKAIVAHKNEDEWEEMDEGAKFKFSLFPNDLVELKTKKEYFFGYYIGLDRATGNISLKEHDGEISKGKDGVYRVGVKLALSFEKYQVDELGKNRQICRPQQRQPVR

SEQ ID NO: 595 - protein, 134 aa, Pasteurella multocida
MVNKEREPALYAGLKARLAEFNQDPAKAFTTPFYKQGGQQVKAIRVEQVQKSGVLVRENNGVADNASIVRTDVFIKNNKFFLVPIYTWQVAKGILPNKAIVAHKNEDEWEEMDEGAKFKFSLFPNDLVELKTKK

SEQ ID NO: 596 - protein, 53 aa, Pasteurella multocida
YSKENAESATFMELKAWHAIRKALENQGLKDTWQDLAKKPDLLDEIGTAFSLL

SEQ ID NO: 597 - protein, 1366 aa, Pediococcus acidilactici
MGDRKYNLGLDIGTSSIGFAAVDENNQPIRVKGKTAIGVRLFEEGKTAADRRGFRTTRRRLSRRRWRINLLNEIFDAHLAEVDPTFLARLKESNRSNLDPKKSFQGSLLFPERKDYQFYEEYPTIYHLRKALMEEDRKFDIREIYLAVHHIIKYRGNFLNGTPMRSFKVENIELDTLFDQLNQLYAEIVPDNELAFDLAQVADVKDVLSSTTIYKMDKKKQLVKMMLLPASNKALQSENKKIVTQFVNAILNYKFKLDVLLQVETDADWSLKLNDEGADDKLEEFTGDLDENRLEIIDLLQRLHNWFSLNEITKDGNSLSAAMVEKYENHHHHLGLLKKVIENHPDAKKAKALKETYTAYVGKTDDKTQNQDDFYKAVEKNLDDSPDAKEIKRLIQLDQFMPKQRTGQNGAIPHQLHQQELDQIIEKQSKYYPFLAEPNPNVKRRKDAPYKLDELIAFKIPYYVGPLVTPEEQAQNKENVFAWMKRKAAGPITPWNFDEKVDRMESANRFIRRMTTKDTYLFGEDVLPAESMIYQKFVVLNELNNLKINGRHLSLKDKQDVYNDLFKQQKTVSIKALQNYYVTKKKAATAPTVGGLADPKKFLSSLSTYIDFKNMFGERVNDPQFQEDLEQIVEWSTIFEDRGIFKAKLQALGWLSEKQIQQLVAKRYKGWGRLSKKLLTGLKNAEGYSILDEMWRSTENFMQIQTRPEFAALIQQANEKQFEGNDPNNVWENIESILGDAYTSPQNKKAIRQVVKVVQDIEKAVGNPPEKIAIEFTREAAANPQRTQSRLRTLEKLYESAEEVVDAGLTAELAEFKENKHVLSDKYYLYFTQLGRDVYTGDTISLDKLNDYDVDHILPQSFIKDDSLDNRVLTIRAVNNGKSDNVPAKMFGKKMGSFWRYLLDNGMISKRKYNNLITDPDNISKYAQKGFINRQLVETSQVIKLTANILNGIYDKDTEIIEVPAKMNSQMRKMFDLVKVREVNDYHHAFDAYLTIFIGKYLYKCYPKLRPYFVYGKFKKFGDNEDIEVGDGRFNFLNRIERLKNVTDPETGEILWSNVAPNETIKQIKKVYNYKFMLVSRETTTRRAELFNQTVYPKNYRGKLIPIKEDRPTDLYGGYSGNTDAYLAIVALEDKKKGKYFKVVGIPTRAAAKLEKLKQQDSQQYLQALHKVIAPQFTKSTKKGIKKTEFEIVLDKVHYRQLVQDGPVKMMLGSSTYKYNAKQLVLSEKALQVIADDRKFDETQKDDNLIAVYDEILSIVNQSFDLYDINGFRKKLNDNRDQFIDLPAETKYEGRKVVAHGKREMILEILKGLHANAAFGNLKPIGFSTAFGQLQVPNGIILSKNAILIHQSPSGLFERKIKLSDL

SEQ ID NO: 598 - protein, 1229 aa, Pediococcus acidilactici; identical to SEQ ID NO: 130

SEQ ID NO: 599 - protein, 270 aa, Pediococcus lolii
LFNQTIYSAKASKTMIPIKNDRPTKLYGGYSGNEDAYMSIIRLSDKKKTYKVVGISMRDASKLKAYENNAHEEYLKKLKEVIEQQFLDSGKKTKADFEIVIPKVNYHQRMQDGTKQFRIGSSKYVHNTKQLVLSEKTLKAIRNNKQYNGDAEKDLINAFDEILTIVNDSFSIFDIRSFRKKLNESRDKFVSLPVEDTKEKSKVIKGKRETLKQILIALHANGTSQDIPQLGLKSFGKMVKTGGLTLSENTALIHQSPSGLFEHKIKLSDL

SEQ ID NO: 600 - protein, 1016 aa, Pediococcus lolii
MNGIFDAHLAEVDPTFLARLKESNRSNLDPKKSFQGSLLFPERKDYQFYKEYPTIYHLRKALMEKDRKFDIREIYLAVHHIIKYRGNFLNGTPMRSFKVENIELDTLFDRLNQLYEEIIPDNELAFDLEQVADVKEVLSSTTIYKMDKKKQLVKMMLLPASNKALQSENKKIVTQFVNAILNYKFKLDVLLQVETDADWSLKLNDEGADDKLEEFTGDLDENRLEIIDLLQRLHNWFSLNEITKDGNSLSAAMVEKYKDHRHHLELLKKVIEDHSDAKKAKALKETYTAYVGKTDDKTQNKDDFYKAVEKNLDDSPEAKEIKRLIQLDQFMPKQRTGQNGAIPHQLHQQELDQIIEKQSKYYPFLAEPNPNVKRRKDAPYKLDELIAFKIPYYVGPLVTPEEQAQNKENVFAWMKRKAAGPITPWNFDEKVDRMESANRFIRRMTTKDTYLFGEDVLPAESMIYEKFVVLNELNNLKINGRHLSLKDKQDIYNDLFKQQKTVSIKALQNYYVTKKKAATAPTVGGLADPKKFLSSLSTYIDFKNMFGERVNDPQFQEDLEQIVEWSTIFEDRGIFKAKLQALGWLSEKQIQQLVAKRYKGWGRLSKKLLTGLKNAEGYSILDEMWHSTENFMQIQTRPEFAALIQQANEKQFEGNDPDNVWENIENILGDAYTSPQNKKAIRQVVKVVQDIEKAVGNPPEKIAIEFTREAAANPQRTQSRLRTLEKLYESAEEVVDAGLTAELAEFKENKHVLSDKYYLYFTQLGRDVYTGDTISLDRLNDYDVDHILPQSFIKDDSLDNRVLTIRAVNNGKSDNVPAKMFGKKMGSFWRYLLDNGMISKRKYNNLITDPDNISKYAQKGFINRQLVETSQVIKLTANILNGIYDKDTEIIEVPAKMNSQMRKMFDLVKVREVNDYHHAFDAYLTIFIGNYLYKCYPKLRPYFVYDNFKKFGNKEDIGHKRFNFLGKIERDKKVVAPETGEILWSNVAPNETIKQIKKVYDYKFMLTSHETYTKHG

SEQ ID NO: 601 - protein, 1333 aa, Planococcus antarcticus
MKNYTIGLDIGVASVGWVCIDENYKILNYNNRHAFGVHEFESAESAAGRRLKRGMRRRYNRRKKRLQLLQSLFDSYITDSGFFSKTDSQHFWKNNNEFENRSLTEVLSSLRISSRKYPTIYHLRSDLIESNKKMDLRLVYLALHNLVKYRGHFLQEGNWSEAASAEGMDDQLLELVTRYAELENLSPLDLSESQWKAAETLLLNRNLTKTDQSKELTAMFGKEYEPFCKLVAGLGVSLHQLFPSSEQALAYKETKTKVQLSNENVEEVMELLLEEESALLEAVQPFYQQVVLYELLKGETYVAKAKVSAFKQYQKDMASLKNLLDKTFGEKVYRSYFISDKNSQREYQKSHKVEVLCKLDQFNKEAKFAETFYKDLKKLLEDKSKTSIGTTEKDEMLRIIKAIDSNQFLQKQKGIQNAAIPHQNSLYEAEKILRNQQAHYPFITTEWIEKVKQILAFRIPYYIGPLVKDTTQSPFSWVERKGDAPITPWNFDEQIDKAASAEAFISRMRKTCTYLKGQEVLPKSSLTYERFEVLNELNGIQLRTTGAESDFRHRLSYEMKCWIIDNVFKQYKTVSTKRLLQELKKSPYADELYDEHTGEIKEVFGTQKENAFATSLSGYISMKSILGAVVDDNPAMTEELIYWIAVFEDREILHLKIQEKYPSITDVQRQKLALVKLPGWGRFSRLLIDGLPLDEQGQSVLDHMEQYSSVFMEVLKNKGFGLEKKIQKMNQHQVDGTKKIRYEDIEELAGSPALKRGIWRSVKIVEELVSIFGEPANIVLEVAREDGEKKRTKSRKDQWEELTKTTLKNDPDLKSFIGEIKSQGDQRFNEQRFWLYVTQQGKCLYTGKALDIQNLSMYEVDHILPQNFVKDDSLDNLALVMPEANQRKNQVGQNKMPLEIIEANQQYAMRTLWERLHELKLISSGKLGRLKKPSFDEVDKDKFIARQLVETRQIIKHVRDLLDERFSKSDIHLVKAGIVSKFRRFSEIPKIRDYNNKHHAMDALFAAALIQSILGKYGKNFLAFDLSKKDRQKQWRSVKGSNKEFFLFKNFGNLRLQSPVTGEEVSGVEYMKHVYFELPWQTTKMTQTGDGMFYKESIFSPKVKQAKYVSPKTEKFVHDEVKNHSICLVEFTFMKKEKEVQETKFIDLKVIEHHQFLKEPESQLAKFLAEKETNSPIIHARIIRTIPKYQKIWIEHFPYYFISTRELHNARQFEISYELMEKVKQLSERSSVEELKIVFGLLIDQMNDNYPIYTKSSIQDRVQKFVDTQLYDFKSFEIGFEELKKAVAANAQRSDTFGSRISKKPKPEEVAIGYESITGLKYRKPRSVVGTKR

SEQ ID NO: 602 - protein, 211 aa, Porphyromonas catoniae
MGKKVLGLDLGVGSIGWCLITLDKDEKPQSILGMGSRIVPLSADDATEFTQGKAITKNKMRTVARTIRKGMDRYQLRREALKKVLREHAMLPDEALIKLPLLELWELRARAATPGEQVSLTELGRVLLHINQKRGYKHAKADEAAEAETKKGKETGYVAQVKGRYQILKEKGLTIGQHFAGELRANQQTAPRGTYYTYRIKEQVYPRVRGV

SEQ ID NO: 603 - protein, 1009 aa, Porphyromonas catoniae
MRIIREAYIEEYDRIMAVQRVFYPELLTDALIGRIRDRIIFYQRPLKSCKQLVSFCEFEKKEKVIRVKHTNKEGVQELVEKTITIGPKVAPKSSPIFQVCKVWESIHNIRLYHPDGTERKLEQEEKQKLFDYLQRNDKLSLTTLRKELKIKPKDKLWCDKLLEKGIAGNTTAAILRKAFKGYEHYERLFRFDLVRRDSHEADEDGVIRPIIDESYQNEPLYKLWHILYSIEDRAEMRSALIGQLGIKAEDLDNGLMDALYKIDFVKQGYGNKSAKFICKLLPHLQEGKMYSEAAEAAGMRHSDSMTAQERDERNLLEEIPLLQKNALRQPVVEKVLNQMINLVNALKREHGEIDEVRVELARELKMSREEREKATKNNSSREKENKAIAERITEYGLTPTKSRIQKYRLWQESAESCIYCGKRVDVVQFLRGEETEVEHIIPKSILFDDSLSNKACACRSCNQEKGNRFAMEYIQAKGWEQDYIERVDSLFHDKKISYSKRQHLLMLPKDLPEDFIERHLRLSQYISREAQGILRKGIRLVSASEGGVTAKLRQLWGYDNILRDLNLERYKSMGETEVVTVEHRDGQRTDERIKDWSKRKDHRHHAIDALVVACTRQSYIQRLNRVNAEADRQEMDAFIKEQQQEHKLSKKEKLSLLENWLKEQPHFTTGEVKEHAEGILISFRPGKRTVSRGRNIYKRSGKTDVQRNVLIPRGALSEETVYGVISVDGENKVVCKYPLQKFLDTKETNVDKIADQAAEKIVDKVLREKIRERIKRYGKKEAFAEPLYLDEAQTQVVRSVRCFISKDQAKLIPLRYNDESEAVGFVAPGNNHHLALYRDASGKMRASVVSFFAAVERARYGIPMIVLNPRETREKARIIPDLPESIFSKLPEEDWVLEETLQEGEMVLLGMENDAIEEAIKKKDYSKLSRYLYRVQSLSYNDYKFCFHLETESEKKEKKKGEDKKRGEKAKNTAVMPPKRYRIRCLATYQEDLNPRKVKIDLLGRISLA

SEQ ID NO: 604 - protein, 1197 aa, Porphyromonas sp.
MLMSKHVLGLDLGVGSIGWCLIALDAQGDPAEILGMGSRVVPLNNATKAIEAFNAGAAFTASQERTARRTMRRGFARYQLRRYRLRRELEKVGMLPDAALIQLPLLELWELRERAATAGRRLTLPELGRVLCHINQKRGYRHVKSDAAAIVGDEGEKKKDSNSAYLAGIRANDEKLQAEHKTVGQYFAEQLRQNQSESPTGGISYRIKDQIFSRQCYIDEYDQIMAVQRVHYPDILTDEFIRMLRDEVIFMQRPLKSCKHLVSLCEFEKQERVMRVQQDDGKGGWQLVERRVKFGPKVAPKSSPLFQLCCIYEAVNNIRLTRPNGSPCDITPEERAKIVAHLQSSASLSFAALKKLLKEKALIADQLTSKSGLKGNSTRVALASALQPYPQYHHLLDMELETRMMTVQLTDEETGEVTEREVAVVTDSYVRKPLYRLWHILYSIEEREAMRRALITQLGMKEEDLDGGLLDQLYRLDFVKPGYGNKSAKFICKLLPQLQQGLGYSEACAAVGYRHSNSPTSEEITERTLLEKIPLLQRNELRQPLVEKILNQMINLVNALKAEYGIDEVRVELARELKMSREERERMARNNKDREERNKGVAAKIRECGLYPTKPRIQKYMLWKEAGRQCLYCGRSIEEEQCLREGGMEVEHIIPKSVLYDDSYGNKTCACRRCNKEKGNRTALEYIRAKGREAEYMKRINDLLKEKKISYSKHQRLRWLKEDIPSDFLERQLRLTQYISRQAMAILQQGIRRVSASEGGVTARLRSLWGYGKILHTLNLDRYDSMGETERVSREGEATEELHITNWSKRMDHRHHAIDALVVACTRQSYIQRLNRLSSEFGREDKKKEDQEAQEQQATETGRLSNLERWLTQRPHFSVRTVSDKVAEILISYRPGQRVVTRGRNIYRKKMADGREVSCVQRGVLVPRGELMEASFYGKILSQGRVRIVKRYPLHDLKGEVVDPHLRELITTYNQELKSREKGAPIPPLCLDKDKKQEVRSVRCYAKTLSLDKAIPMCFDEKGEPTAFVKSASNHHLALYRTPKGKLVESIVTFWDAVDRARYGIPLVITHPREVMEQVLQRGDIPEQVLSLLPPSDWVFVDSLQQDEMVVIGLSDEELQRALEAQNYRKISEHLYRVQKMSSSYYVFRYHLETSVADDKNTSGRIPKFHRVQSLKAYEERNIRKVRVDLLGRISLL

SEQ ID NO: 605 - protein, 1422 aa, Prevotella denticola
MTQKVLGLDLGTNSIGSSVRNLDLSDDLKGQLEFFSSDIFRSSVNKESNGREYSLAAQRSAHSRSRGLNEARRRKLWATLDLLIKYGFCPMSPESLMRWRTYDKQRGLFREYPIDDKNFNAWILLDFDGDGKPDYSSPYQLRRELVIRQFDFDQPIERYKLGRALYHIAQHRGFKSSKGETLSQQETNSKQSLTDDTADVAGEMKASEEKLSKGLSTYMKENNLLTVGAAFAQLEDEGVRVRNNNDYRAIRSQFQREIETIFKFQQGLSVENELYERLVSEKKNIGTIFYKRPLRSQRGNVGKCTLERTKPRCAIGHPLFEKFRAWTLINNIKVRMSEEEQAEQLPMKLRFELYNDCFLAFVRAEFKFEDIRKYLEKRLGVHFSYNDKTINYKDSTSVAGCPITARFRKLLGEDWESFHVDGQKQRQAHGKNNASFHTVSYSTNDIWHFCYDAEEPEAVLSFAQDNLKWEKKKAEELVRIWSAIPQGYAMLSQKAIRNINKMLILGLKYSDAVLLAKVPEIVEITDGEILSVTEDYHRVEAQVGYEKQINNIVNALIAKYKSASEEYRFADHNYEYQLDKSDEKDIIKQIESNIGTRKWSLLDADEQTDILQKVRDKYQNFFRSHERKFVESPKLGECFEEYLMKKFPMVEGERWKKLYHPSQIAIYRPVPANKDRSALRLGNPDIGAIKNPTVLRVLNTLRKRVNQLLDDGIISPDETRVVVETARELNDANRKWALDTYNRIRHDENEKIKKILAEFYPKRDNISTVDIDKARYVIDQREMDYFTEAKTYHKDIKKYKLWLEQGGQCMYTGRTINLSNLFDPNSFDVEHTIPESISFDSSDMNLTLCDAHYNRFIKKNHIPADLPNYDKSVVIDGKEYSPIKPRLQRWADRVERLNRNVEYWRGQARRAQNKDRKDQCMREMHLWKMELEYWTKKLERFTITEVTDEFKNSQLVDTRVITRHAVLYLKSIFPHVDVQRGDVTAKFRKILGIQSVDEKKDRSLHSHHAIDATTLTIIPGAAKRERMLELFAKIEEVNKMLSFSGNEDRTGLKQELDGLKNQLNKEVKACRIGHNVSEIGTFINDNIIINHHVKNQALTPVRRRLRKRGHIVGGMDNPRWQTGDALRGEIHKASYYGAITQYAKDKEGKVLMKEGRPQINPTIKFVIRRELKYKKSSTDSGFASWDDLGKAIVDKELFALMKGQFPEGTSFKDACEQGIYMIKKGKNGEVDTKLYRIRHIRCKTKQKNALKIKEQAYKSEKEYKRYFYAAVGDLYAMCCYTNGKTREFKIYSLYDISCHRKVGVEDIPEFITDKKGNRLMLDYKLHTGDMILLYKENPEELYDLDNVSLSKLLYKINGFENDGLRIRMVNHLVAKEAMGESVKDYAKLPDIIRCGVKTIKFLVMGENRDFVIKNGKISFNHR

SEQ ID NO: 606 - protein, 443 aa, Prevotella disiens
MELDYWKGKYNRFTMTEIPEGFSRRQGMGIGLISRYAGLYLKTIFHKKDNPQKSNVYIVKGSITAEFRRIWNIQDDYEKKCRDNHIHHCIDAIVVGCIGKREYDLMAQFYRDEEKYRWEKKKKPFFKKPWETFTQDMLSLKDEVLTVHFNPSNFTKKAHKKVFTPKGIFVAQGDCARVKLHKESYFGAIEQKGEIKYVMRKELSALKIEDIKNIVDAVVKEKVLAVVKKKGFKQAMAEPIYMNEDKRILIKKVRLFVSQTNPLIVKKHRDLSSKEYKQNYYVDNEGNLMIAMYEGVKKNGKIDREITVVNNLEAAKFFRQSQKNNAEKQLISHLSPKNGYPLKTVLTQKQLVLMYEDSPKEIKLRDTKNMVKRLYQVVEIEKDGRVKLKFHQEARSEGLNKNSAAFKIQDTPESLYRHTKSNLKVLVNGVDFKINILGEISLI

SEQ ID NO: 607 - protein, 1375 aa, Prevotella histicola
MKKILGLDLGTTSIGWALVYESENTDEKSSIVRLGVRVNPLSVDEKGNFEKGKAITTNADRQQTHGARINLQRYKLRRENLKDCLQKQGWIGTEALCEEGKTSTFETYMLRAKAAEEEISLHELCRVLFMMNKKRGYKSNRKANNKEDGKLFDGMTVAKKLYEEHLTPAEYSFQLLSSGKKFKQEYYRSDLKEEFDRIWNEQQKYYPEILTDDFKQQLQGKSKGNTSKIFLGKYGIYSADLKGLDRKLQPLKWRVEALKQQVDKEVLAFVISDLNGQIASTSGLLGAISDRSKELYFNKQTVGQYLWTSLKETPHVSIKNKPFYRQDYLDEFEKIWETQATYHKELTPELKQEIRDIIIFYQRPLKSKKGLISVCELEQRKVKVTIDGKEKEISIGPKVAPKSSPMFQEFRIWQNLNNILLIDKGNNSIHPLYEEEKNLLYEELSVKEKLSKAEALKVLNKNSKQWDLNYKEIEGNRTQAVLYDCYNRIIVMTGHEEYNFKKLKASEIRSYVKTTFTGLGFNTDILEFDSSLTGHELEKQPMYQLWHLLYSYESDNSRTGNDALLRKLETAFGFPKEYAAVLSDVVFEDSYGNLSVKAMRKILPHLQAGLNYSQACEEAGYKHSRRSLTKNELDQKEYKEKLELLPKNSLHNPVVEKILNQMINVINAVIDEYGKPDEIRIELARELKIGAAERENMTRSINQGNAENKRIREILEKEFALSYISRNDIIKYKLYEELKSNGFKTLYSDTYISKDKLFSKDFDIEHIIPKARLFDDSLSNKTIEARDVNIAKSNKTAFDFISEKYDQQGIEAYKKKLDILLQDGSISKAKYNRLLMKEADIPSGFIDRDLRDTQYIAKKAYEILSDLVRNVTPTTGAVTSRLREDWQLVDVMKELNFEKYQKLGLVEVIEDRDGRKIKRIKDWTKRNDHRHHAMDALTIAFTKPSYIQYLNNLNARSDKNSSIYGIENKELHREDNKLRFNAPLPINEFRAEARRHLKSILVSVKAKNKVMTQNVNVIKTKHGVIKKVQLTPRGELHNATFYGTKKRPIIKMVKVGAALDEVTIKKVSSSFIREALLDRLHEYNGDAKKAFTGRNSIDKNPIYIDEEHKKTVPALVKTIEWEMYHPTRKLISPDLKIDKVIDKGIREILKTRLAKFNGDAQKAFSNLDENPIYKDEAKKITLKRVSLEGVSSVIPLHTLKDREGKLVVGKDGKPVLGDYVQTSNNHHIAFYMDENGNLQDNVVSFFEAAERKSQGVPVIDKNYNHDKGWNFLFTMKQNEYFVFPNEVTGFNPSEVDLMDEANYSIISPNLYRVQKMSKASGRDYWFRHHLEAMLNDDPKLRNSMFKRITSLKALEGIVKVRINCIGKIVAVGEYD

SEQ ID NO: 608 - protein, 1380 aa, Prevotella intermedia
MKRILGLDLGTTSIGWALVNEAENNNEASSIVRLGVRVNPLTVDEKSNFEKGKAITTNADRQLRHGARINLQRYKLRRQNLHDCLQKQGWLGTEAMYEEGKASTFETYKLRAKAAEEEISLHEFARVLFMLNKKRGYKSNRKANNKEDGQLFDGMTIAKKLYEEHLTPAEYSLQLLNKGKKFTQGYYRSDLNAELERIWDEQKKYYPEILTDEFKQQLEGKTKTNTSKIFLAKYGIYSADLKGLDRKFQPLKWRVEALQQQVDKEVLAFVISDLKGQIANTSGLLGAISDRSKELYFNKQTVGQYLWASLEENPHISIKNKPFYRQDYLDEFEKIWETQAAFHKQLTPELKQEIRDIIIFYQRPLKSKKSLISVCELEQRKVKATIDGKEKEITIGPKVAPKSSPVFQEFRIWQNLNNVLLIDNDTNEKRPLDEVERNLLYKELSIKAKLSKTEALKILNKKGKQWDLNYRELEGNRTQAILFDCYNRIITLTGHEECDFKKIKASEIRHYVSTIFKNLGFSTEILDFDPSLKKHELEKQPMYQLWHLLYSYESDNSRTGNESLLRKLETTFGFPEEYATVLCDVVFEEDYGNLSVKAMREILPYLQAGNDYSQACAYAGYNHSRHSLTKEELDQKVYKERLELLPKNSLRNPVVEKILNQMINVINAIIDEYGKPDEIRIEMARELKSSAADRKKTTHAISQGNAENQRIREILEKEFSLSYISRNDIIKYKLYEELEPNYYKTLYSDTYITKDKLFSKDFDIEHIIPKARLFDDSFSNKTLEARNINLEKSNKTAFDFIKEKYGEDGAEAYKKKLDMLLENDAISRPKYNNLLRAEADIPSDFINRDLRNTQYIAKKACEILGELVKTVTPTTGKITNRLREDWQLVDVMKELNFEKYEKLGLTEIVEDRDGRKIKRIKDWTKRNDHRHHAMDALAIAFTKPSFIQYLNNLNARSNKGDSIYAIENKELHYEEGKLRFNAPIPVNEFRAEAKRHLSAILVSIKAKNKVMTQNVNKIKTKHGIIKKIQLTPRGPLHNETIYGTKMRPIIKMVKVGAALDEATINKVSSPAIREALLKRLNEYSGNAKKAFTGKNTLEKNPIYLNAGRTKTVPSLVKTVEWESFHPTRKLIDKDLNVDKVVDKGIREILKARLEEFNGDAKKAFSNLEENPIYLDEAKKIALKRVSIEGVLSAIPLHTLKNQAGKPITGKDGKPVLGNYVQTSNNHHIAFYYDEDGNLQDNAVSFFEAAERKSQGIPVIDKDYNRDKGWRFLFTMKQNEYFVFPNEATGFIPSEVDLTDEANYGIISPNLYRVQKVSRIDKGTSASRDYWFRHHLETILNDDAKLKNLAFKRIRGLLELKDIIKVRINSTGKIVAVGEYD

SEQ ID NO: 609 - protein, 129 aa, Prevotella multiformis
MQKGGTGCKINRQTVGNVEVNVLNLRLYDRTDDREVTAGYLPTKEDYVRLFVYLNDRKEINQDTLLKDYFRLKKVKCGNEKEFAIRWNYIEDKEKKYPCNETRHELLAALDRAGMEHGWLDDSGTSARW

SEQ ID NO: 610 - protein, 535 aa, Prevotella multiformis
MVKGLLSNIVRTAEEREETSKFVISCTGRITDRLKQDWGLNDVWNSLVYTRFKRLNELTETEAFGHWQDKDRRVFQTSVPLELQRGFSKKRIDHRHHAMDALVIACASRNIIGYLNNESAESPEKREDLRRKLCDKNHIIRKPWESFTQDARAALEDIVVSFKNYVRIINKATNYYERYDADGRKTKAEQKGGEMWAVRKPMHEATYYGKVNLRRKERVSLKAALEDIPSICNRDLRDYINGLVEKHFNKEQVLAQFRSVGNRWNKQHIDKVDVWRFSDGKEEMVATRKPLDTSFDAKRIEAVTDTGIQRILSNYLEAKGGDPKIAFTPEGIADMNQHITAYNNGKQHKPILKVRVSTKLGKKYPVGQTGCKAGQFVVAEAGTNLYFAVYEDGEGNRSYDTIPLNEAVECLKQGLPPVPETREKGDRLKFYLSPNDLVYVPAGDEENEIDRERIYKFVDSSGTTANFIPHRTAGLIYNVDKKLAEALCNGSIIQNEYGVGSQQSKNQKALTGEMVKAVCWKLEVDRLGNILRIIK

SEQ ID NO: 611 - protein, 1380 aa, Prevotella nigrescens
MKRILGLDLGTTSIGWALVNEAESNNEASSIVRLGVRVNPLTVDEKSNFEKGKAITTNADRQLRHGARINLQRYKLRRQNLHDCLQKQGWLGTEAMYEEGKASTFETYKLRAKAAEEEISLHEFARVLFMLNKKRGYKSNRKANNKEDGQLFDGMTIAKKLYEEHLTPAEYSLQLLNKGKKFTQGYYRSDLNAELERIWDEQKKYYPEILTDEFKQQLEGKTKTNTSKIFLAKYGIYSADLKGLDRKLQPLKWRVEALKQQVDKEVLAFVISDLKGQIANTSGLLGAISDRSKELYFNKQTVGQYLWASLEENPHISIKNKPFYRQDYLDEFEKIWETQATFHKQLTPELKQEIRDIIIFYQRPLKSKKSLISVCELEQRKVKATIDGKEKEITIGPKVAPKSSPVFQEFRIWQNLNNVLLIDNDTNEKRPLDEDERYLLYKELSIKAKLSKTEALKILNKKGKQWDLNYKELEGNRTQAILFDCYNRIITLTGHEECDFKKIKASEIRHYVSTIFKNLGFSTEILDFDPSLEKHELEKQPMYQLWHLLYSYESDNSRTGNESLLRKLETTFGFPEEYATVLCDVVFEEDYGNLSVKAMRKILPYLQAGNDYSQACAYAGYNHSRHSLTKEELDQKVYKERLELLPKNSLRNPVVEKILNQMINVINAIIDEYGKPDEIRIEMARELKSSAADRKKTTHAINQGNDENQCIREILEKEFALSYISRNDIIKYKLYEELKPNGFKTLYSDTYIPKDKLFSKDFDIEHIIPKARLFDDSYSNKTLEARDINLAKSNKTAFDFVKEKYGEQGAEAYKKKLDMLLGNNVISKPKYNKLLMTEADIPSDFINRDLRNTQYIARKACEILGELVRTVTPTTGKITNRLREDWQLVDVMKELNFEKYEKLGLTEIVEDRDGRKIKRIKDWTKRNDHRHHAMDALAIAFTKPSYIQYLNNLNARSNKGDSIYAIENKELHYEEGKLRFNAPIPVNVFRAEAKRHLSAILVSIKAKNKVMTQNVNKIKTKHGIIKKIQLTPRGPLHNETIYGTKMRPIIKKVKVGAALDEATINKVSSPAIREVLLKRLNEYSGNAKKAFTGKNTLDKNPIYLNAERTKTVPASVKTVEWENYHPIRKPITPDLKVDKVIDKGIGEILKARLEEFNGDAKKAFSNLEENPIYLDQTKKIALKRVSIEGVLSTIPLHTLKNQAGKPIMGKDGKPVLGNYVQTSNNHHIAFYYDEDGNLQDNAVSFFEAAERKSQGISVIDKDYNRDKGWRFLFTMKQNEYFVFPNEATGFIPSEVDLTDEANYGIISPNLYRVQKMSRIEKGTSVSRDYWFRHHLETILNDDSRLKNSAFKRINSLKPLEGIIKVRINSIGKIVAVGEYD

SEQ ID NO: 612 - protein, 1506 aa, Prevotella nigrescens
MKTILGLDLGPNSIGWAKVEVDDEGNYLRNIKLGSRIIPMTQDMLGDFDKGVKVSQTAIRTDFRGNRRLIERHLLRRERLHRVLHALKFLPKHYEDAIGWDRNEPATYGKFVNNSEPKLAWERQEDGSMRFLFMESFNEMVADFAQNQPSLVSDGKKIPLDWTIYYLRKKALTRPIKKEELAWILLNFNQKRGYYQLRGEEEEDNLTKRKEYYKLKVVGVEADGAPKGGKTWYNIHLENGWTARCQSKIPLDDWVGKVKEYIVTTEYEDDGKTPKCDKEGKVKRSFKSPEKDDWQLIKTRTEKFIDDSNKTVGAFIYDYLLEKPFDKIRGKYIRTIERKYYKNELREILREQTKYHEGLHSLEALKICAEELYKNNQQHQEYLLKKDMTFLLLNDLIFYQRPLKSKKSLIADCPYEVYKYDDKLTGKKGQKKIKCIAKSNPYYQEFRLWQFIANLRLFSVTDGKEVTAEYLKTEEDYVRLFSFLNDRKDIKQETFLRSFLKLKKESIGSEKIYPIRWNYIEDANKSYPCNATRHELLLAFDRADIPRELLDVEEREYRLWHLLYSIEAKEETESALRKLKANKAFGDLNIDDAFVNSFLKIKPFEKEYGAYSEKAIKKLLAVMRRGSLWKEADICEATKQNIAKILQNDIDEKLKKKIEAAVSSFNKLSDFQGLPTWLACYVVYGRHSEAAQIQCWQSPEDLKTYINKFKQHSLRNPIVEQCLLETLRTVYDIWKDAGQIDEIHIELGRNMKSTAEQRARKTKDILRNENTNLRIKNLLVELKNDDKIENVRPYSPSQQEILRIYEEGALQELSKEDEMFEDISKISKMAQPSPTELSRYKLWLEQKYRSPYTGRVIPLSKLFTTAYQIEHIIPQSRYFDDSFNNKVICESEVNSLKDNMLGYEFIKECGGRIVHCTLLGDVKIFTKEEYKDFVTKHYIDNTYKRDKLLLEDIPQEFSARQLNDSRYISKMVQTVLSNIVRAENEQEATSKFVVSCNGAITNRLKKDWGLNDVWSSIVCPRFKRLNEITKTNAFGHWEDKAGKHVFQTTVPLELQRGFSKKRIDHRHHAMDALVIACASRNIVNYLNNESANSPEKREDLRKKLCDEKRKIRKPWKTFTQDAREALSDVVVSFKNYVRVINKATNYYEHYSSSGNKVMISQKGNDMWAIRKPLHKESVFGRVNLCRKVIVSLKKALENIPAICDKTLRDYINALVEKHFNTRQLLAHFKSINYRLNRQCVEKVEVWQFSDEKIEMVARRKSLDTSFDDKQISSITDTGIQKILLNYLQTKDGNAEIAFTPEGIEEMNKNISLYNDGKAHQPILKVRVATPKGMKYPVGQTGNKATKFVVAEKGTNLYFAIYENELGVRSYDTIPLNIVVERLKEGLSPVPQANEADIPLKFYLSPNDLVYVPTKENEDELCRDRIYKFVDSSGTTANFVPHTSANTIYNVDKEYAEKCCNGAVFLNEYGLGSPQSKNQRALTGEMIKEICWKLKVDRLGNIIKVIK

SEQ ID NO: 613 - protein, 774 aa, Prevotella oulorum
MEQCILETLRTVYDIWKEAGQIDEIHVELGREMKQTAEQRAHLTEKVLRNENTNLRIKSLLMELKNDADMKDVRPYSPMQQEILRIYEEGALQTLSKDDAAFTEIMKISKMAQPSASELQRYRLWLEQKYRSPYTGKPISLSKLFTSAYQIEHIIPKKRYFDDSFSNKVICEAEVNGKKDSMLAYEFIKDCGGDVIHCTTLGDVTILSEAEYKALVTELYANNKSKKDKLLMEDIPQDFINRQLNDSRYISRVVMTLLSNIVRIEGEEEATSKFVIPCSGGITDKLKKDWGLNDVWNNIVYPRFERLNALTNTSDFGQWENKEGKRVFQTSVPLELQRGYQKKRIDHRHHAMDALVIACASRKIINYLNNQEANDPTKQENARKQLCIKSRIIRKPWETFTQDAYKALDNIVVSFKNYVRVINKATNYYERYNADGKKAVDEQKGEAMWAIRKPMHKDTVFGHVNLRRKAVVKLKDALENIPAICDKTLRHYIQDLQKKHFNTKQLLAHFKSINYRLNKQAVDKVEVWQYSDDKEQLAATRKPLGPSFDAKCIAAITDTGIQKILLNYLQAKGGDPAIAFTPEGIAEMNQNIAVYNGGKQHQPILKVRIAKPMGKKFPIGQTGNKAFQYVIAEEGTNLYFAIYEDEEGNRTYDTIALREVVERLKQGLTPVPEKNEKGVALKFHLSPNDLVYVPTADELLSKVCSLDKNRIYKMVSATKSECLFIPHSVAKTIYDKVEFEALNKMGRALTGEMIKSVCWKIEVDRLGHIVNIIK

SEQ ID NO: 614 - protein, 691 aa, Prevotella oulorum
MKTILGLDLGTNSIGWAKVIVDDNENYLRDIQLGSRIIPMSQDVLGKFDKGVTESQTAIRTSFRGVRRLRERTLQRRERLHRVLHTLHYLPPHYDSAIGWDRKTPTTYGKFLNHGEPKLAWERREDGTMQFLFMDAFHEMIADFAKYQPALVADGKKVPLDWTIYYLRKKALTQPIKKEELAWILLNFNQKRGYYQLRGEEDEENAAKHEEYHELKVVGVEVDEAGKGDNTWYNVKLENGWTYHRQSKIPLDDWVGKVRAFIVTTEYEKDGTTPKKDKEGNVKRSFRSPDEKDWGLRKKQTEHSLEASGTPVGAFIYDHLLKEPSDKIRGKFIHTIERKYYKQELAAILREQSKHHEKLCSKDMLKACIEELYPNNPLHRESLLKKDMPYLLIEDLIFYQRPLKSKKSLIAECPYEAYSYVDKETGEMKRQGIKCIAKSNPYYQEFRLWQLIANLRLRNRSDERDVTAEYLPHQEDYVRLFTYLNDRKEINQETLLKDFFKLKKVTIGGEKVFPIRWDYIEDKEKKYPCNATRHELLLALDRAGIEHDWLNDRDLAYRLWHLLYSVDSKDETERALRKLKDDDAFVESFLKIKPFEKEYGAYSEKAIKKLLPVMRRGSLWNEADLCPSTKERIANILQGTIDEKLKKKIGAFISSCQQVSDFQGLPEWLACYVVYGRHSEATDIQRWETPE

SEQ ID NO: 615 - protein, 242 aa, Prevotella saccharolytica
MKLVLGLDLGVGSVGWALIFITDSGEPIKILALGERIVSMDSNNSNEFSAGATCTLNQKKTKAKSVRKGYSRYVQRRDALTAELRHIGMMPDETLIKLPVLDLWQLRANAATEGKKLSLAEIGRVLYHINQRRGYKHGKSDVSSDNKQKGYVKAVNERYCMIQERQQTIGQYFALKLKETAVTTEKGTFYTFRIKDQVFPREAYEEEFVVAYSTKVLKFKQITTLLNVVICLMMLLLIVQRY

SEQ ID NO: 616 - protein, 1174 aa, Prevotella sp.
MEFHPELCDAELLKACAEELYRNNEAHRAQLLAKDFKHLLVEDVLFYQRPLKSKKSLIANCPYETRQYINKETGEIKDVNVKCIAKSNPYFQEFRLWQWISNLRLLRQADGQDVTAAYIKGNEDKERLFDLLNNQGEIKQEHILRDFLKLKKPKGGEFPLRWNYVDDKIYPANETRHAINKAIKGMAVDKEEKETLGQLLDQPAVAYMLWNLLYSITDRNELARALRRFALTHGVSSVDAFVESFLKVKPFKKEYGAYSEKATKKLLQVMRLGKYWCGDELPEPAKRTKGNKQAVYDEMAHRGICKQTLQNISNIIEENIDERLMGALLNPERPLTELSHFQGLSVSDACYVVYGRHSEVAEIVKWKDADELNTFINNFKQHSMRNPIVEQCVLETLRTVRDVWEQEGQIDEIHVELGRNMKRTAEQRARDTQAIQRNENTNMRISLLLTELKNDPSISDVRPYSPSQRELLKIYEEGALENLTNQDEDIAKISRLAQPSASELRRYKLWLDQKYVSPYTGRPIPLAKLFTPAYEIEHIIPQSRYFDNSFSNKVICEAEVNKLKDNLLGMEFIKKFGGKTKGILDEEAYKLHVTTNYAHNPAKRSKLLMEDLPTDFNSRQLNDTRYISKTVMALLSNVVREEGERETRSKHVVVCTGGVTDTLKKDWGLHDVWHNLVYPRFIRLNNLTGSQNFGYWRYLNEENSKKGEDSKKVFQITLPPECQRGFVKKRIDHRHHAMDALVIACASANIVNYLNNQSAANPHIHENLQRLLCDRKREIRKPWPTFTQDAQAALKDLVVSFKNTVRVVNKASNTYLRYDKDGKKKRFKQEGEGLKAIRKPMHKETYYGEVNLIRKEMVPLKRALDDVNAIVDKELRASIKGLLRDGFNPQQVLANFKAKDFKFDKRDIKKVEVYVSSEKSTPMVATRKSLDTSFNAKRIADITDTGIQKILLNYLKANDNSPEQAFTPEGIAYLNEHIAEYNDGKPHQPILKVRVSEVKGAKFAVGQTGSKKDKFVEAQSGTNLYFAIYEDKEGKRHFETIALKVAAERLKDKQMPVPEINDAGLPLKFYLSPNDLVYVPTDEDRATAHPSIDKMRIYKMVSATDRQCFFLPFTVASVISNKVEFEALNKMERVLDASEYSSAYDSSHVNKVMVKNVCWKLEVDRLGNITKIVR

SEQ ID NO: 617 - protein, 992 aa, Prevotella sp.
MITRILGLDTGTNSLAWAVVDRDANGNYTLVKRGDVIFTEGVKIEKGIESSKAAERTAHKALRVHYSRRRLHKIDTLKVLVELNLCPCLSDEQLSQWKAKKTYPLTDDFMLWQRSGSAEENNPYYCRHRCLTQKLDLTDQSQRFLLGRAFYHLAQRRGFLSNRLDTSADSDESGKVKSGIAQLSVEMEKAGCEFLGEYFYQLYKQHGNTIKLRSRYTDREEHYKKEFLAICEKQELDPKWVEALQRAIYFQRPLKSQRKGVGKCTFEPKKPRCAESHPDYEAFRMLCFLNNVKIQTPNDTSLRPLNEDEREKIWPIFFRKSKPNFDFEDIAKALAGKNNYAWYKDAGEKPFKFNYRMQQGVSGCPVTAQLIDIFGSDWQTAIAETYTAVEKKNGTKTIDEMADDVWNVLYSFSSKDKLKAFATEKLQLDEASATKFANAKLPHGFASLSLKAIRNILPFLRQGFIYAHAVHLAKIPDIVTKAVWNDADKREMILSGLMEIIENYNPKDRGVEGTIDFCIKSHLQDVIDLRPGAADALYHPSMIETYPDAKLNKMGVFQLGSPRTNAIRNPMAMRSLHILRSVVNQLLRDGIIDRDTEVHVEYARELNDANKRKAIADYQREQEKKRKQYRDDIIALYKSECHKEIEPTDTDILKFQLWEEQNHLCLYTGTQIGICDFLGDNPKFDIEHTVPRSVGGDSTQMNLTLCDATFNRQVKGAQLPSQLSNHADILVRIDHWKSKCEDLRKQLDKIRTYGGMEKNMKDRLIQKRHRLKMDLDYWQGKYSRFTMTEVPEGFSRRQGAGIGLVSKYAGLFLKSLFHNEQNPNKSNVYVVKGVTTAEFRRMWGLQGEYEKKSRLNHCHHCIDAITIACIGKAEYDKMAQYYHDEELFQWRGTTTKPHFNKPWPTFTEDVLAIEQSLLVKHLTKDNMPKQAKKRVRTATGKYLAQGDTARGSLHKDTYYGAIEQNGEIRYVLRKPLNKFENEAELEKIVDQA

SEQ ID NO: 618 - protein, 1375 aa, Prevotella sp.
MKKILGLDLGTTSIGWALVNESENKDEQSSIVRLGVRVIPLTVDEKGNFEKGKAITTNADRQQVHAARINLQRYKLRRENLRDCLQKQGWIGSEPMCEDGKSSTFETYKLRAKAAVEEVSLHEFARVLFMLNKKRGYKSNRKANDKEEGKLFDGMTIAKKLYEEHLTPAEYSLQLLNTGRKFTPEYYRSDLIEEFEKIWNEQQKYYPEILTDEFKQQLEGKAKSNTSKLFLGKYGIYSADTKGLDRRLQPLKWRVEAMKQQVDKDVLAFVISDLKGQIANTSGLLGAISDRSKELYFSKQTIGQYLWASLQENPHISIKNQPFYRQDYLDEFEKIWETQATYHKELTSELKQEIRDIIIFYQRPLKSKKNLIAVCELEQRKVKVTVDGKEKEITIGPKIAPKSSPMFQEFRIWQNLNNILLLDHETNSKRPLYEEERNLLYEELSVKEKLSKTEALKVLGKKSKQWDLNYKELEGNRTQAVLYDCYNRIIVMSGHEECNFKKLKASDIRHYVKMIFKNLAFNTDILCFDSSLKGHELERQPMCQLWHLLYSYEGDNSRTGNDALLRKLETSFGFPKEYAAVLADVIFEDSYGNLSVKAMRNILPHLQAGKDYSQACEEAGYKHSRRSLTKEELNQKVYKEKLELLPKNSLHNPVVEKILNQMVNVINAVIEEYGKPDEIRIELARDLKIGAAERENMTRSINQGNAENKRIREILEKEFALSYLSRNDIIKYKLYEELKSNGFKTLYSDTYISKDKLFSKDFDIEHIIPKARLFDDSLSNKTIEARDVNIAKSNKTAFDFILERYGEQGVKTYKTKLLRLLEDGAISNKKYNNLLKTEADIPSGFIDRDLRNTQYIAKKAYEILSELVKIVTPTTGSVTNRLREDWQLVDVMKELNFEKYQKLGLADVIEDRDGRKVKRIKDWTKRNDHRHHAMDALTIAFTKPSYIQYLNNLNARSDKSSSIYGIEVKELHREEGKFRFNAPLPINEFRAEAKRHLKSVLVSIKAKKKVMTQNVNKIKTKHGIIKKVQLTPRGELHNATYYGTKKRPLVRMVKVGAALDEATIKRVCSPAIRAALLKRLNAYNGDAKEAFTGRNSIDKNPIYLDIEQTKLVPVLVKTIEWGMYHPIRKRITPDLKIDKVIDKGIREKLKARLAEFNGDAQKAFSNLDENPIYMDEAKRITLKRVSIEGVLSAIPLHTLKDKAGKPVIGSDGKPVFGDYVQTSNNHHIAFYIDDKGNLQDNPVSFFEAAERKSQGVPVIDRRYNCDKGWHFVFTMKQNEYFVFPNEATGFIPSEVDLLDEANYCIISPNLYRVQKLSKASGRDYWFRHHLETMLNDDLRLKNSTFKRIQSLKGLEDIVKVRINSIGKIVAVGKYD

SEQ ID NO: 619 - protein, 1483 aa, Prevotella sp.
MKTILGLDLGTNSIGWAKVSVDDYGNYLHDIKLGSRIIPMSQDVLGNFDSGVTVSQTAQRTEFRSKRRLVQRNLQRRERLHRVLHVLDFLPAHYDAAIGWDRTEAVTYGKFLNHAEPKLAWEELGNGKRRFLFMDSFHEMVADFARCQPALVADGKKIPLDWTIYYLRKKALTQAITKEELAWILLNFNQKRGYYQLRGEEEEENPTKQEEYYELKVVSVEATDSRKGNDTWYNVHLENGWIYRRSSKISLDDWVGKVKQFIVTTEYEKDGTTLKTDKEGNVKRSFRAPNENDWGLRKKRTETLLEMSGKTVGAFIYDHLLQEPADKIRGNFIRTIERHYYKAELEAILAEQCKYHIELRDKEMLEACARELYLNNLPHQRSLMKKDMTYLLLYDLIFYQRPLKSKKALIANCPYEYYEYVDKETGEIKRQNIKCIAKSNPYFQEFRLWQFVLNLRLFDRVEDKEVTANYLPTADDHARLFTYLNDRKEINQETLLKDYFKLKKVKIGNEKEYPIRWNYIEDKEKKYPCNETRYELLMALDRAGIEHKWLDDNNLEYRLWHLLYSVEVKSESETALRKLKNDDAFVNSFLKVKPFKKEYGAYSEKAIKRLLAVMRKGFLWNEQDICDETRKRIEIIIKGDVDEKVKERMGHAAYSFDRVSDFQGLPEWLACYVVYGRHSEAMDIQRWDSPERLMAYINNFKQYSLRNPIVEQCILETLRTVHDIWKETGQIDEIHVELGREMKSTSEERARRTQNVLRNENTNLRIKSLLIELKNDTDICNVHPYSPMQQEILRIYEEGALQELNREDEDFEEISKISQMSQPSGKELNRYKLWLEQKYRSPYTGKAISLAKLFTPAYQIEHVIPQSRYFDDSFTNKVICEAEVNTLKSNLLGYEFIKKHGGEIIHCTTLGDVRIFSESEYKAFVMDHYANNKSKKDKLLMEDIPQEFLSRQMNDSRYISKVVKTLLSNIVRMADESEATSKSVIVCTGGVTDRLKKDWGLNDVWNSIVYSRFERLNRLTGTEAFGHWENKDGKRVFQTSMPLELQRGFRKKRIDHRHHAMDALVIACASRNIVNYLNNESANNPKKREDLRRQLCDKNRVIRKPWETFTQDAYNALENVVVSFKNYVRVINKATNRYEHYDENGKKRFVQQKGSELWAIRKPMHKETYYGHVNLRRKELVTLQKALDDIPSICDKKLRDYISALVEKHFNKRQLLAHFKSTDYYWQKQYVNKVYVWTFSDDIKPLVATRKLLDTSFDAKRIGTITDTGIQKILRNYLEAKGGNATLAFTPEGIVEMNQNISKYNDGKPHQPILKVRITEPMGAKYRVGQTENKMAKYVEAQSGTNLYFAIYEDSEGKRSYTTVPLDEVAERLKQRLSPVPEKDENDVPLKFYLSPNDLVYVPTEEELQLRECKLNKDRIYKMVSSTGSECHFIPYYVANVIYNKVEFEAKNKIGRALTGEMIKAVCWKLEIDRLGNILKVIK

SEQ ID NO: 620 - protein, 593 aa, Prevotella sp.
MNTRILGLDTGTNSLAWAVVDRDAKGNYTLVRRGDVIFTEGVNVDGQPVPSKAAVKSKYKSLRVQYARRRLRKIDTLKVLVSLDLCPYLSDQQLSQWKAKKTYPLTDDFMLWQRSGSAEENNPYYCRYRCLTQKLDLTDQSQRFLLGRAFYHLAQRRGFLSNRLDTTSDSAESGKVKSGIAQLSVEMEKAGCTFLGEYFYQLYKQHGNTVRLRSRYTDREEHYIKEFLAICEKQELDAQWVEKLQRALYFQRPLKSQRKGVGKCTFEPKKPRCAESHPDYEAFRMLCILNNIKIKTPKDVSLRPLNAEEREKVWPLFFRKSKPNFDFEDIAKALAGKNNYAWYKDAGEKPFRFNYRMHQGVSGCPVTAQLIDIFGSDWKAGIAETYTAVGKKNGTKTIDEMADDVWNVLYSFSSKDKLKAFATDKLQLDEARATKFANAKLPHGFAALSLKAIRNILPFLRQGFIYAHAVLLAKIPDIVTAAVWDDADKREQILSGLLEVIENYNPDDRGIEGTIDFCIKSHLQDVVDLRPGAADALYHPSMIEAYPDAKLNKMGVFQLGSPRTNAIRNPMAMRSLHILRSVVNLLLRDGMLS

SEQ ID NO: 621 - protein, 1424 aa, Prevotella sp.
MTQKVLGLDLGTNSIGSAVRNLDLSDDLQWQLEFFSSDIFRSSVNKESNGREYSLAAQRSAHRRSRGLNEVRRRRLWATLNLLIKHGFCPMSSESLMRWCTYDKRKGLFREYPIDDKDFNAWILLDFNGDGRPDYSSPYQLRRELVTRQFDFEQPIERYKLGRALYHIAQHRGFKSSKGETLSQQETNSKPSSTDEIPDVAGAMKASEEKLSKGLSTYMKEHNLLTVGAAFAQLEDEGVRVRNNNDYRAIRSQFQHEIETIFKFQQGLSVESELYERLISEKKNVGTIFYKRPLRSQRGNVGKCTLERSKPRCAIGHPLFEKFRAWTLINNIKVRMSVDTLDEQLPMKLRLDLYNECFLAFVRTEFKFEDIRKYLEKRLGIHFSYNDKTINYKDSTSVAGCPITARFRKMLGEEWESFRVEGQKERQAHSKNNISFHRVSYSIEDIWHFCYDAEEPEAVLAFAQETLRLERKKAEELVRIWSAMPQGYAMLSQKAIRNINKILMLGLKYSDAVILAKVPELVDVSDEELLSIAKDYYLVEAQVNYDKRINSIVNGLIAKYKSVSEEYRFADHNYEYLLDESDEKDIIRQIENSLGARRWSLMDANEQTDILQKVRDRYQDFFRSHERKFVESPKLGESFENYLTKKFPMVEREQWKKLYHPSQITIYRPVSVGKDRSVLRLGNPDIGAIKNPTVLRVLNTLRRRVNQLLDDGVISPDETRVVVETARELNDANRKWALDTYNRIRHDENEKIKKILEEFYPKRDGISTDDIDKARYVIDQREVDYFTGSKTYNKDIKKYKFWLEQGGQCMYTGRTINLSNLFDPNAFDIEHTIPESLSFDSSDMNLTLCDAHYNRFIKKNHIPTDMPNYDKAITIDGKEYPAITSQLQRWVERVERLNRNVEYWKGQARRAQNKDRKDQCMREMHLWKMELEYWKKKLERFTVTEVTDGFKNSQLVDTRVITRHAVLYLKSIFPHVDVQRGDVTAKFRKILGIQSVDEKKDRSLHSHHAIDATTLTIIPVSAKRDRMLELFAKIEEINKMLSFSGSEDRTGLIQELEGLKNKLQMEVKVCRIGHNVSEIGTFINDNIIVNHHIKNQALTPVRRRLRKKGYIVGGVDNPRWQTGDALRGEIHKASYYGAITQFAKDDEGKVLMKEGRPQVNPTIKFVIRRELKYKKSAADSGFASWDDLGKAIVDKELFALMKGQFPAETSFKDACEQGIYMIKKGKNGMPDIKLHHIRHVRCEAPQSGLKIKEQTYKSEKEYKRYFYAAVGDLYAMCCYTNGKIREFRIYSLYDVSCHRKSDIEDIPEFITDKKGNRLMLDYKLRTGDMILLYKDNPAELYDLDNVNLSRRLYKINRFESQSNLVLMTHHLSTSKERGRSLGKTVDYQNLPESIRSSVKSLNFLIMGENRDFVIKNGKIIFNHR

SEQ ID NO: 622 - protein, 241 aa, Prevotella sp.
QAVKEKIKEAIAGKNFKTAIAEPIFMNKEKGIRINKVRYYVKAQERLKIRQQRDLSSKEYKQFFCVENESNYLLAIYEGELKGKKERDFCVVNNLDSAACLKRSNKGKAAPLVPERSEERNLPLLAVLKRGTQVLFYENSPEEILFDNPQDLVRRLYKVTGINTKKDVKNGKTYLYGNIELRFHQNAQKKDDVKMQSGVYKNNEVLRQGIVLSHKQFKALVEGVDFEFNVLGEIKKKERHA

SEQ ID NO: 623 - protein, 1216 aa, Prevotella stercorea
MTKILGIDTGTNSLGWAIVDKTADNYNLLDKGVNIFQEGVKIEKGIESSKAAERTEHRATRVRYYRIKLRKIRLLRILSDNHLCPPLSQEELSTWRLKKVYPKNELFMQWQRTDDDTEKTPYAYRHKCIHEKLDLSDVTDRYILGRAFYHIIQRRGFLSNRKEQGGEDSGKVKEGISTLTHEMNEAGYEYLGDYFYALYNKGEKIRKHYTARNEHFLSEFKAICEKQDLEKELGSEVVRNIEKAIFDQRPLKSQKGQVGKCVFEKNKTKCPSSHPMYEEFRMLTFINNIKIKTPNDDVLRPLNTGEREKIMPLFFRKSKKQFDFEDITKKLAPKKMYGFYKKEEDAEMPFLFNYPMDTSVSGCPVTAALKDVFGDDWITAICETYTLGEGKSRFDIVNDIWHALYFYSDKDKLAEFAINRLQLSEDEAKIFSEISLPADYASLSLKAICKILPYLRRGLIYSHAVFLGNLCEVMPKYEWSIKEMRETIIDNIIMEMDKCDTKDKRTFEVCIKDYLKGQYNVSDNSLKKLYHPSMIETYPRVQYTNEHGVYQLGSPRIDSVRNPMAMRSMFRLRKLVNRLLVEGKIDQNTEVHIEFARELNDANKRNAIALFVKENQSANDEARKQIITLFKKETGTDIEPTDKDILKYVLWEEQNHICLYTGKQIRISDFIGANPKFDIEHTIPRSVGGDSTKMNLTLCDSRFNREVKKTKLPVELPNHDEIMERIKEWKKNYELLDIQIRKNKKLSKGATTKEQKDTIIRKRHLLELRRDYWRGKYERFTMESVPEGFSRRQGTDISVISKYARLYLKSLFNRVYTVKGIATSDFRKIWGIQDIYSKKERINHVHHCIDAIVIACIGLDEYNKLGAYYHDEENNKWYGMSKASFKKPWATFVEDIKKIQDEILVYHYTPDNMPKQGRRRIKIDGKKILCKGDAARGSLHNDTYYGAIENDGAVKYVKRIDLASLEEKDVKNIVDDTVRSIIEAAIKEKGFKDAMASTIWMNEEKRVPIKKVRCFTPSITKPLNIRKQRDVSIKEYKQQYHVANDSNYLLALYIGTDNKGKEKREFEIVNILQAAQYYRTSNDKEVVDRHIVPIKSEHDYPFAYTLKIGTMVLLYEKSPNEVWDATIKERNRRLYKVTGLSTMRMKGRNGEYAYATVKLIHNEEARPSKDIKAKNGEYEQGEEFRPAIIMLHTQLNALVQGYDFEINELGEIRRLR

SEQ ID NO: 624 - protein, 1487 aa, Prevotella timonensis; identical to SEQ ID NO: 135

SEQ ID NO: 625 - protein, 770 aa, Pseudoramibacter alactolyticus
MAKGYFASDEEIDFSGVDDGFKNTLSSHQKFKEIFDVEVLNDWQKSMSEKIIFWATVYGDSKKFLKERLEDAYGNELDQKQIKRILGLRFKDWGRLSEAFLNLEGKNSKTNQSQTIIEALWNGDGTNNFNLMELLSSQFTYRDTLKKRALKGEKTLTNITYEDLSDLYLSPSVRRMVWQTILIVKELRQVLGAGPAKIFIEMARDVTLKAGTRTTSRRQQLLDLYKNVQTESRNWVEEIETQEESRFRSKKIFLYYTQMGQCMYTGEPIVFKDLFNRNLYDIDHIYPRHFVKDDSLINNLVLVKKQANSHKSDTFPIENSIQQARRDFWKWLSEKGLISREKFNRLTRRTSFSDEELAGFISRQIVETRQGTKAVAQIFENALPDSEVVYVKAGNVSDFRHHFNLLKCREINDLHHAQDAYLNVVVGNVYHTKFTKNPINFIKGYRKDRKAYAYHMDQIFDHPVKRNDIIAWQTDKNQSIATVKKVMAKGTPLVTRMSYEEHGELSNQNICSAKAAQKAEGKGYLPIKNSERLSNTQRYGGYNKYAGSYFFLVEHTLKKNRVRTIETMPLFLRDTIKTSKDLLKYCCESLKLEAPSIRVMKIKMGSLLSVNGAFVYLTGRSGKKLITPNGFQLILPQKWQDYIRLLIKTKDSPDDVEGISGGKNIEFYDILVEKHTKTCLKNRPNPIGEKLREWRNDFIALDNQKQSDILLEILKLTTFDNSGADLRAIGGKNQSGVSTIGKKISSQKSVVLVHRSVTGIFEKQVDLLSI

SEQ ID NO: 626 - protein, 103 aa, Rhizobium etli
MSGEQLTREIGRSGVKASAVGLGTWAIGGWMWGGTDEAQSIAAIQASLDAGVTLIDTAPAYGLGRSEEIVGKALAGRRDKAVIATKCGLVWHTQKGNHFFDQD

SEQ ID NO: 627 - protein, 1059 aa, Rhodovulum sp.
MGIRFAFDLGTNSIGWAVWRTGPGVFGEDTAASLDGSGVLIFKDGRNPKDGQSLATMRRVPRQSRKRRDRFVLRRRDLLAALRKAGLFPVDVEEGRRLAATDPYHLRAKALDESLTPHEMGRVIFHLNQRRGFRSNRKADRQDREKGKIAEGSKRLAETLAATNCRTLGEFLWSRHRGTPRTRSPTRIRMEGEGAKALYAFYPTREMVRAEFERLWTAQSRFAPDLLTPERHEEIAGILFRQRDLAPPKIGCCTFEPSERRLPRALPSVEARGIYERLAHLRITTGPVSDRGLTRPERDVLASALLAGKSLTFKAVRKTLKILPHALVNFEEAGEKGLDGALTAKLLSKPDHYGAAWHGLSFAEKDTFVGKLLDEADEERLIRRLVTENRLSEDAARRCASIPLADGYGRLGRTANTEILAALVEETDETGTVVTYAEAVRRAGERTGRNWHHSDERDGVILDRLPYYGEILQRHVVPGSGEPEEKNEAARWGRLANPTVHIGLNQLRKVVNRLIAAHGRPDQIVVELARELKLNREQKERLDRENRKNREENERRTAILAEHGQRDTAENKIRLRLFEEQARANAGIALCPYTGRAIGIAELFTSEVEIDHILPVSLTLDDSLANRVLCRREANREKRRQTPFQAFGATPAWNDIVARAAKLPPNKRWRFDPAALERFEREGGFLGRQLNETKYLSRLAKIYLGKICDPDRVYVTPGTLTGLLRARWGLNSILSDSNFKNRSDHRHHAVDAVVIGVLTRGMIQRIAHDAARAEDQDLDRVFRDVPVPFEDFRDHVRERVSTITVAVKPEHGKGGALHEDTSYGLVPDTDPNAALGNLVVRKPIRSLTAGEVDRVRDRALRARLGALAAPFRDESGRVRDAKGLAQALEAFGAENGIRRVRILKPDASVVTIADRRTGVPYRAVAPGENHHVDIVQMRDGSWRGFAASVFEVNRPGWRPEWEVKKLGGKLVMRLHKGDMVELSDKDGQRRVKVVQQIEISANRVRLSPHNDGGKLQDRHADADDPFRWDLATIPLLKDRGCVAVRVDPIGVVTLRRSNV

SEQ ID NO: 628 - protein, 1405 aa, Riemerella anatipestifer
MKTILGLDLGTNSIGWALVKEAENSNEKSEIIKLGVRVNPLTVDEKTNFEAGRPLSTNADRTAKRSARRNLQRYKLRRKNLIDLLIKNQLIDKDTPLTEIGKNTTHQTLELRAKAARERIELEDLARVFLAINKKRGYRSSRKVNNEEEGQAVDGMAVAKKLYDENLTPGQYAYELLSKGKKYVPDFYRSDLQAEFNAIWEYQKQFYADILDDELYNALKGQGQQNSRKRFLAIKGVYTAENKGKRDDVKLRHYKWRSEAISKKINIEEVAYVLVEINNDLNKSSGYLGAISDRSKELYFNKETVGENLWKQIQKNPHTSLKNQVFYRQDYLDEFEQIWETQAQFHPQLTLALKEQIRDVIIFYQRKLKSQKGLLSFCQFESWEIERKDENGNVILNKTTQLPKRQTVGRRVAPKSSPLFQEFKIWQNINNLEVTKISEGASKNKKETETLSDDERKLLFEELNLRGNLSQKEVLQILGLKDKEYKTNFSEGLEGNRTNAALFNIYQQIAENEGYGFDWSKKSAQEIKEELKAVFPQIGIQADILDFNANLDGKEFENQASYQLWHLLYSAEEDDKINEEDQIIYGNSAVSLKKKLCEKFGFTPEYAKWIANVSLQDDYGNLSTKAMRKIIPYLIDGNDYSEACALAGYNHSNSLTKEENDNRELLDKLELLPKNSLRNPVVEKILNQMVNVVNQVIETYGKPDEVRIELARELKKSAEKRAEMTKSINEATRRNEDIKKLITKDFGIPNPTKSDVVRYRLWEELAPLAYKDVFTGKQIKKEDLFSSKIDIEHIIPKALLFDDSFSNKTLVFRETNLKKADRTAYDFIESDYNATLDDYIQRVETLYNNTKGTISKGKRNKLLMAQKNLPDGFIERDLRNSQYIAKKAKAMLYQVFKDVNVTSGSITDRLREDWDLINVMKELNFPKYKALGLTEIEERYDIGQEKTKRVEVITDWTKRNDHRHHAMNALTVAFTTSSHIQYLNYLNARKNESHKEHKNIKGIENKITHKQKDKRKFIPPMPNFREEAKKHIETILVSIKNKNKVYTKNINKTKKKSGHNTKEQLTPRGQLHKETVYGKSKRPMSKPTKINKNFSLEQAQLIINVQEKELVLRHLAQFDNNPAVAFDTKTLKKMPLLKNGEPLKEVLCFEEIFTIRKDITPDLKIEKVVDEKIKAILEQRKKDFGGNAKEAFSDLDKNPIWLNKKKGICIKRVTITGVSNAEALHHQKDHLGREILDDNGNPIPADFVSTGNNHHLAVYLDSEGKLQDNIVSFYEAVVRTSQGLPVVDKGLNKDLGWKFLFSLKQNEMFVFPNDDFDINDFDLLDDKKAELISKHLYRVQKISKVSAGNSFVRDIVFRHHLETTVKEVKELKDISYIQLKSLEGLRNIKKVRINHIGKIVQVGEY

SEQ ID NO: 629 - protein, 1145 aa, Riemerella anatipestifer
MKTILGLDLGTNSIGWALVKETENSNEKSEIIKLGVRVNPLTVDEKTNFEAGRPLSTNADRTAKRSARRNLQRYKLRRKNLIDLLIKHRLIDKDTPLTEIGKNTTHQTLELRAKAARERIELEDLARVFLAINKKRGYRSSRKVNNEEEGQVVDGMAVAKKLYDENLTPGQYAYELLSKGKKYVPDFYRSDLQAEFDSIWEYQKQFYADILDDELYNALKGQGQQNSRKRFLAIKGVYTAENKGKRDEVKLQHYKWRSEAITQKLSIEEVAYVLVEINNDLNKSSGYLGAISDRSKELYFNKETVGENLWKQIQKNPHTSLKNQVFYRQDYLDEFEQIWETQAQFHPQLTLALKEQIRDVVIFYQRKLKSQKGLLSFCQFESWEIERKDENGNVILNKTTQLPKRQTVGRRVAPKSSPLFQEFKIWQNINNLEIAKISDGNSKNKKETEALSDDERKLLFEELNLRGNLSQKEVLQILGLKDKEYKTNFPEGLEGNRTNAALFNIYQQIAENEGYGDWTKKSAQEIKEELKAVFPQIGIQADILDFNAELDGKEFENQASYQLWHLLYSAEEDDKINEEDQIIYGNSAVSLKKKLCEKFGFTPEYAKWIANVSLQDDYGNLSTKAMRKIIPYLIDGNDYSEACALAGYNHSNSLTKEENDNRERLNKLELLPKNSLRNPVVEKILNQMVNVVNQVIETYGKPDEVRIELARELKKSAEERAEMTKGINEATRRNEDIKKLITKNFGIPNPTKNDVVRYRLWEELAPLAYKDVFTGRQIKKEDLFSSKIDIEHIIPKALLFDDSFSNKTLAFRETNLKKADRTAYGFIESDYNATLDDYIQRVETLYNNAKGTISKGKRNKLLMAQKNLPDGFIERDLRNSQYIAKKAKSMIEKVFNDVNVTSGSITDRLREDWDLINVMKELNFPKYKALGLTEIEERYDIGQEKTKKVEVITDWTKRNDHRHHAMDALTVAFTTKSHVQYLNNLNTIHSLKGDEVDLELSKLYGLKNTITEVVNKKRKFIPPMPNFREEAKKHIETILVSIKNKNKVYTKNINKTKKESGYHTKEQLTPRGQLHKETVYGKSKRPMNKPTKINKNFSLEQAQLIINVQEKELVLRHLAQFDNNPAVAFDTKTLKKCHYLKMVNL

SEQ ID NO: 630 - protein, 1400 aa, Riemerella anatipestifer
MKTILGLDLGTNSIGWALVKETENSNEKSEIIKLGVRVNPLTVDEKTNFEAGRPLSTNADRTAKRSARRNLQRYKLRRKNLIDLLIKHRLIDKDTPLTEIGKNTTHQTLELRAKAARERIELEDLARVFLAINKKRGYRSSRKVNNEEEGQVVDGMAVAKKLYDENLTPGQYAYELLSKGKKYVPDFYRSDLQAEFDSIWEYQKQFYADILDDELYNALKGQGQQNSRKRFLAIKGVYTAENKGKRDEVKLQHYKWRSEAITQKLSIEEVAYVLVEINNDLNKSSGYLGAISDRSKELYFNKETVGENLWKQIQKNPHTSLKNQVFYRQDYLDEFEQIWETQAQFHPQLTLALKEQIRDVVIFYQRKLKSQKGLLSFCQFESWEIERKDENGNVILNKTTQLPKRQTVGRRVAPKSSPLFQEFKIWQNINNLEIAKISDGNSKNKKETEALSDDERKLLFEELNLRGNLSQKEVLQILGLKDKEYKTNFPEGLEGNRTNAALFNIYQQIAENEGYGDWTKKSAQEIKEELKAVFPQIGIQADILDFNAELDGKEFENQASYQLWHLLYSAEEDDKINEEDQIIYGNSAVSLKKKLCEKFGFTPEYAKWIANVSLQDDYGNLSTKAMRKIIPYLIDGNDYSEACALAGYNHSNSLTKEENDNRERLNKLELLPKNSLRNPVVEKILNQMVNVVNQVIETYGKPDEVRIELARELKKSAEERAEMTKGINEATRRNEDIKKLITKNFGIPNPTKNDVVRYRLWEELAPLAYKDVFTGRQIKKEDLFSSKIDIEHIIPKALLFDDSFSNKTLAFRETNLKKADRTAYGFIESDYNATLDDYIQRVETLYNNAKGTISKGKRNKLLMAQKNLPDGFIERDLRNSQYIAKKAKSMIEKVFNDVNVTSGSITDRLREDWDLINVMKELNFPKYKALGLTEIEERYDIGQEKTKKVEVITDWTKRNDHRHHAMDALTVAFTTKSHVQYLNNLNTIHSLKGDEVDLELSKLYGLKNTITEVVNKKRKFIPPMPNFREEAKKHIETILVSIKNKNKVYTKNINKTKKESGYHTKEQLTPRGQLHKETVYGKSKRPMNKPTKINKNFSLEQAQLIINVQEKELVLRHLAQFDNNPAVAFDTKTLKKMPLLKNGEPLKEVLCFEEIFTIRKDITPDLKIEKVVDEKIKAILEQRKKDFGGNAKEAFSDLDKNPIWLNKEKGICIKRVTITGVSNAEALHHQKDHLGREILDDNGNPIPADFVSTGNNHHVAIYEDEKGKLQEKVVSLYEAVARANQGLPVVDKGLNEDLGWKFLFTMKQNEMFVFPNDDFDVNDIDLLDENNAKIISQHLFRVQKLATKNYMFRHHLETNVQEVKELNDIAYKSIRSTEPLKNIKKVRINHIGKIVQVGEY

SEQ ID NO: 631 - protein, 1128 aa, Roseburia intestinalis
MDEKMDYRIGLDIGIASVGWAVLQNNSDDEPVRIVDLGVRIFDTAEIPKTGESLAGPRRAARTTRRRLRRRKHRLDRIKWLFENQGLINIDDFLKRYNMAGLPDVYQLRYEALDRKLTDEELAQVLLHIAKHRGFRSTRKAETAAKENGAVLKATDENQKRMQEKGYRTVGEMIYLDEAFRIGCSWSEKGYILTPRNKAENYQHTMLRAMLVEEVKEIFSSQRRLGNKKATEELEEKYLEIMTSQRSFDLGPGMQPDGKPSPYAMEGFSDRVGKCTFLGDQGELRGAKGTYTAEYFVALQKINHTKLVNQDGETRNFTEEERRALTLLLFTQKEVKYAAVRKKLGLPEDILFYNLNYKKAATKEEQQKENQNTEKAKFIGMPYYHDYKKCLEERVKYLTENEVRDLFDEIGMILTCYKNDDSRTERLAKLGLVPIEMEGLLAYTPTKFQHLSMKAMRNIIPFLEKGMTYDKACEEAGYDFKADSKGTKQKLLTGENVNQTINEITNPVVKRSVSQTVKVINAIIRTYGSPQAINIELAREMSKTFEERRKIKGDMEKRQKNNEDVKKQIQELGKLSPTGQDILKYRLWQEQQGICMYSGKTIPLEELFKPGYDIDHILPYSITFDDSFRNKVLVTSQENRQKGNRTPYEYMGNDEQRWNEFETRVKTTIRDYKKQQKLLKKHFSEEERSEFKERNLTDTKYITTVIYNMIRQNLEMAPLNRPEKKKQVRAVNGAITAYLRKRWGLPQKNRETDTHHAMDAVVIACCTDGMIQKISRYTKVRERCYSKGTEFVDAETGEIFRPEDYSRAEWDEIFGVHIPKPWETFRAELDVRMGDDPKGFLDTHSDVALELDYPEYIYENLRPIFVSRMPNHKVTGAAHADTIRSPRHFKDEGIVLTKTALTDLKLDKDGEIDGYYNPQSDLLLYEALKKQLLLYGNDAKKAFAQDFHKPKADGTEGPVVRKVKIQKKQTMGVFVDSGNGIAENGGMVRIDVFRVNGKYYFVPVYTADVVKKVLPNRASTANKPYSEWRTMEDKDFLFSLYSRDLVHIKSKKGIPIKNVDGSLGESKEVYAYYIGADISGAKIEGKAHDSRYTFRGIGVQKLELIEKCQVDILGHISTVKNEKRMGFS

SEQ ID NO: 632 - protein, 1471 aa, Scardovia wiggsiae
MGYKAPRNDKGEIDYGVGLDLGNGSVGWVAMDKDYHLIRARGHELIGARLFDPANSAENRRESRTTRRRLSRRRWRLRMLDSLFASELAKIDPNFLARRKYSWVHPKDEQNHENWYGSIIFGSKEQDKQFYKDYPTIYHLRKKLTEDTERHDIREIYVAIHHIVKYRGHFLREGEINSENLFDPEGFVELIKDVIKLNNSYDESTPIFEASPADVSEALLNEHTSRSGRIEDTLDKLDFSVSRVDKHELKGMRDAAKAVIGAIVGNTADFSKIFNLDNLDKDSKDNLKLKFADSNFDEKYGGVVGSGLLDETQIELVDRIHAVYDAVALKGILGDAHTISEAKVESYEKHRKNWKLIKEELRTKENKDEVDLWYGDLSGRQYKNPPDPEKGPDEGSKKDSPIRDSDQKQNLIKKANDYFTELIDDSQLSEEQKNCLKNDINNGQLFPVQRSSDNGVIPYQIHLNELRRIIENQKQYYPFLAETFIRKTAEGKSYEENKIVALLKFRVPYYVGPLVSKEDMEEHSSGNSAYHWMARNPGRGEAITPWNFDEVVDKDESGARFISRLTGTDTYLLGEPTLPQHSLLYEEYMVLSELNNVRLNVRQGNHWSDKNRQRLSYKQKEFLIENLFKEHKTVTRKRAEDCLSSMGCGEVQLFGLSDEKKFASSLSSYITLKKILGKAFVDDSGNSAILERIIEVQTVFEDREPLTHQLSLIDSLTVEQRKQLAKIHYTGWGKLSRKLLTSKKGSYKIHSQNEIMRTQHSIIDIMRGDSLNLIEIIRDKKIGIGEWIDNENLDRETGESDVSRLESVFEGIVMSPRVKRGVVQAVRVIDDLAKAIGNPPQRIFIEMADEVQASQRTVSRLSRLKALYGSPSLQKEFNDLKDLRKSLNETKDADLQEDRLYLYYIQLGKDLYTGKEISIDSLSSAYDIDHIVPQALTQDDSIDNRVLVSRKENARKTDSYLYTPDLIKNMRPLWGKLLAAGLMSQKKYDALTRVDDFKDREKQRFVQRSLVETRQIMKNVSTILRTYYGEDTNVVTLKSSITHDMRKYLGFPYKNRDINDYHHAQDALCISAAGQFMLNRHFVSGGEVTDGASNAYNMYLAEYLQEFRDAKARGERKRSTAFGFVVGSMSSKDDEKRTDHRTGEIVWSETNAEYLRKVMNYKKMLITQKVGDVKTRALYDETRYGHKESSAKSIKFDNLRRDTSLYGGFSGASTAYMMLVEYKKKNKLVSITAQEASLLAVADQKNDTVSVMDGILASHGLSGAKILLPKIVTGQLLDYSDALVTLQSASELNTARQMWLPRNDYNDIDIILKSKDIEDAAHKLGYDSDTVHVLRRIQKLFEAVFRVAESQFPLHQLSKDQQEEILRDPQNYGFGSAVKLLGGLLKALHANAENTNLAGLVKVLHGDKEYSDDGKAKEFKKFGFSPRWRRISNPTGFTLSDSDTFIYQSPSGIFEQRVTVKELKEKADKQK

SEQ ID NO: 633 - protein, 116 aa, Sphingobacterium spiritivorum
MFRKYFEEKNSARLLFTLKQGDFVYVPDDNEEVILDESSPLFIDYWKNISERSNNIHVVQKFSGKEIYFLKHTIADTIAKKIEFGSQDCYQSLNGKSIKEFCIKIDSDRLGNISKV

SEQ ID NO: 634 - protein, 1306 aa, Sphingobacterium spiritivorum; identical to SEQ ID NO: 98

SEQ ID NO: 635 - protein, 1110 aa, Sphingobium sp.
MAEGKKRIWRLGADLGANSLGWAAIELSAPVNGKPIAILAAGSRIFSDGRDPKSGASLAVDRRDARAMRRRRDRFKQRQKALIKYLIADGLFPADEAARNAMAAIDPYAVRARALDEALSLPELGRALFHLNQRRGFKSNRKADRKADDDAGKIAIGIDRTRDAIAEDEADAGAEPGSWTFGKWLHERRLKGQSVRTRLRPESGEDAKGDGYDFYPDRALMEEEFDAIWAAQAPHHPDVLTNDVHDRLHEIIFYQRPLKAPQVGMCSLIPGDRRLPKAHPLFQRRRLLEELNALMIVRPGEVAQRLTREERDILLLKLKDKNKVSFATLRKALKLDPDARFNKESEDRTDLKGDEVAAVMGSKTRFGNLWVHLSIEAQWDVLARLDAVESDAEDAAFCAWLVETYALTPEQARAVANAPLPPGYGRFGETATRKLIEALRDGKKDDRVLVYSEAVTEAGLGHHSDRRTGEVFEDAKGRPQLPYYGVALERHIMPGTGDPSDPEEMRVGRLTNPTVHIGLNQLRRILNVLIRAYGPPAEIAIELARELKLTDEDKKRINRENNDNRIAAERRSEKLLAIGQADSGANRALLKLWEELNPANVLDRRCIYSGRQISIDMLFSAAVEVDHILPFAATLDDSNGNKIVCLREANREKRKRSPHDAWGHSARWDEIAARAAQLPRNKRWRFEPDAMDKFRDEGGFQARHLVDTQYLARLSREYLATLYPEKGEGSGHIWVSPGRLTEMVRRKLGLNDLLPDHNFGGGADQAKNRLDHRHHAIDAVVVAIVDRGMLNAIARASGQEGAEGRERIIIPEPWDGFRDALRETVNRITVSHRTDHGTASKAGLPKGKDATAGRLHNDTAYGFTGDTDAKGNSIVVRRVPLSSFKKLADLDRIRDADLKAALYQHLNGLEGKAFEKALAEFHKLEWHNFGGVRRVRVTEPLTVIPIKDRNGRIYKGYKGDSNYRYDVWELPDGKWVTNWKNEAGEAMSSVISMFDAHQSSEPPRPHPAARKILSLHQNDLLAIEREGEDRKLMRVVKFGQSGQITLAEHQQAGDLKKRDAVSNDDDPFKYFAPTSGGLKKVKARQVRIDEIGRVLDPGFPARTARRKTRG

SEQ ID NO: 636 - protein, 1084 aa, Sporolactobacillus vineae
MKYSIGLDIGISSVGWSVINLDRERIELMGARLFDAAENPKNGSSLAAPRRDARSARRRLRRRRYRVGRVRHFIIDRGLVTRGQADQLFDWKDGDLDIWLVRVNALERLLTDREFARVLIHIAKNRGYRSNRKSEAKSGENGQVLSAIKANKELMEEKGYQTVAEMLVNEPETFAGRKRNRGGEYTHVIARSELEHEIRLIFTKQRAFGNRFATEENENTYVKIWAAQRPVATKDDILKKIGDCTFEKGEKRAPKASYAFQYFRALDKLNRLRILSVREPSRNLTDDERNLIVPALFNHDKQKYSDLRKILQLRDDQKFNELFYDPGKSLKENENKTFLSLAEQYKIRKVIRDVQGKDGLLQYRPLDIDTIAYALTVFKDDQDTRDYLSNTFVNGNGKQVLNLANRAFDAELIDGLLSLSFAKFGHLSLKALHKLIPHMEQGLSYYDACKKVGYHDNEQVGKSKQHLLPVIPADEIRNPVVVRSLSQTRKVINAIIKRYGSPTFMYIELAREMGRPYNERRDLEKQYNKNRTVNDSAIEQIHELYPEIGAPRGHDILKYKLWQQQDCKCAYSLEKIPAEKIFEPGYAEVDHIIPYSRSFDDSNSNKVLVLSRMNQEKKNRTPYEWFGGDEHRWNKFESYVNALKVNRKKKSLLTKKNMDTEEEDTFKSRHLNDTRYITRFIKSFVEDNLLFREIEGAKQHVFTVNGAYTSLMRKRWGFNKNREESDLHHSVDAVIIAVSQPFRNEVSRYFKHREISLPQLLKRTWDYFPEPWEGFVKELRARTLQDPEKLKLALESLDLDSYDPEFIDEVKPIFISRMPKRSIKGQIHDETLRRNRGKTKDGFVKIVTRTRLENIKFDKNGDFPMYGRESDPKTYQAIKQRYLENNKDKKKAFIEPLYKPAKNPNNASLIRSVKIEDKANQIVPLRDEAVAYNASIVRTEVYRNKETGKFYLAPVYVSDVFAGREPRRFIRANVPYEQWVNITDKFTFLFNLYPNDVIYIKMKKVKTTKSNINKTISWQESYFYFKGTDIHTGAITIIDHMNSFTDRVGTQGLQLFEKYQVDPLGNLSRVHGETQYGVPALSHS

SEQ ID NO: 637 - protein, 475 aa, Staphylococcus massiliensis
MGQDYILGLDIGITSVGYGLIDYHDKSVIDAGVRLFKEANVENNEGRRSKRGSRRLQRRRKHRLARTRNLLESYQLNPFPKCEKNPYEIRVKGFKEVLTSDELSAALLHLAKRRGIDNVHVTDTESDSSDNGLSTKEQLAKNQKALESRYVCELQLERLLNDNKVRGANNRFKTQDFVREAKQILSIQKDHHNLDQVFIDKYISLLETRREYYEGPGKGSPYGWDGDIKKWYELLMGRCTYFPESLRSVKYAYSADLFNALNDLNNLVIVRDENDKLTYPEKYHIVENVFKQRKKPTLKQIAKEIDVAPEDIRGYRVTASGTPVFTSFKLYHDIKSVTSNDKVLEDTELLDAIAEVLTIYQSPIEVQEKLESLNVILTKEEIEGISKLTGYTGTHALSLKAIQIVIDELWETNDNQMTIFTRLNMKPQKVDLAKANKIPTSLVEDFIISPVAKRAFIQSIKVINAVIKNMVCLKI

SEQ ID NO: 638 - protein, 581 aa, Staphylococcus massiliensis
MPKDIIIELAREKNSDEERKIIRDVQKRNQQTRDLVDKVIKETGKTKAKGMVEKLILHDKQEGKCLYSLKSIPLEDLLNNPHHYEVDHIIPRSVSYDNSMNNKVLVLQEENSKKSNQTPFQYFNSSNTHITFKQFKQHVLNLSKTKDRITKKKKEYLLEERDINKFSVQKEFINRNLVDTRYATRELMTLLRAYFSANELDVKVKAINGGFTSYLRKRWDFKKDRNAGYKHHAEDALIIANVDFIFKQLKALDNAKKVMEGRKVQVEKDNVEDNEHYESLFREPDQIKEIKLYDNYKFSHRVDKKPNRELINDTIYSTRKVDNKTYTIQTVNNIYDKQNDQLKKLFNKSPEKFLMYKHDPKTFDKLATIMRQYKNEKNPLYKFHDETGEYLTKYAKKDNGPIVKSLKYIGKQVNAHLDITNDYENSNNKVVKLSLKPFRFDVYLDDGKYKFVTVKYLDIIKKDTYYVIDEEKYKLALQQKKISENAKFIGSFYNNDLIKINGELLRVIGVNDDAKNTLELNMIDISYRDYVENMNLATTPRIRKNIGKSITILEKYTTDILGNTFKISSPEKPQFIFKVRD

SEQ ID NO: 639 - protein, 1334 aa, Staphylococcus pseudintermedius; identical to SEQ ID NO: 205

SEQ ID NO: 640 - protein, 1112 aa, Staphylococcus simulans; identical to SEQ ID NO: 252

SEQ ID NO: 641 - protein, 773 aa, Streptococcus agalactiae
MNKPYSIGLDIGTNSVGWSIITDDYKVPAKKMRVLGNTDKEYIKKNLIGALLFDGGNTAADRRLKRTARRRYTRRRNRILYLQEIFAEEMSKVDDSFFHRLEDSFLVEEDKRGSKYPIFATLQEEKDYHEKFSTIYHLRKELADKKEKADLRLIYIALAHIIKFRGHFLIEDDSFDVRNTDISKQYQDFLEIFNTTFENNDLLSQNVDVEAILTDKISKSAKKDRILAQYPNQKSTGIFAEFLKLIVGNQADFKKYFNLEDKTPLQFAKDSYDEDLENLLGQIGDEFADLFSAAKKLYDSVLLSGILTVIDLSTKAPLSASMIQRYDEHREDLKQLKQFVKASLPEKYQEIFADSSKDGYAGYIEGKTNQEAFYKYLSKLLTKQEDSENFLEKIKNEDFLRKQRTFDNGSIPHQVHLTELKAIIRRQSEYYPFLKENQDRIEKILTFRIPYYIGPLAREKSDFAWMTRKTDDSIRPWNFEDLVDKEKSAEAFIHRMTNNDFYLPEEKVLPKHSLIYEKFTVYNELTKVRYKNEQGETYFFDSNIKQEIFDGVFKEHRKVSKKKLLDFLAKEYEEFRIVDVIGLDKENKAFNASLGTYHDLEKILDKDFLDNPDNESILEDIVQTLTLFEDREMIKKRLENYKDLFTESQLKKLYRRHYTGWGRLSAKLINGIRDKESQKTILDYLIDDGRSNRNFMQLINDDGLSFKSIISKAQAGSHSDNLKEVVGELAGSPAIKKGILQSLKIVDELVKVMGYEPEQIVVEMARENQTTNQ

SEQ ID NO: 642 - protein, 1370 aa, Streptococcus agalactiae
MNKPYSIGLDIGTNSVGWSIITDDYKVPAKKMRVLGNTDKEYIKKNLIGALLFDGGNTAADRRLKRTARRRYTRRRNRILYLQEIFAEEMSKVDDSFFHRLEDSFLVEEDKRGSKYPIFATMQEEKDYHEKFPTIYHLRKELADKKEKADLRLVYLALAHIIKFRGHFLIEDDRFDVRNTDIQKQYQAFLEIFDTSFENNHLLSQNVDVEAILTDKISKSAKKDRILAQYPNQKSTGIFAEFLKLIVGNQADFKKHFNLEDKTPLQFAKDSYDEDLENLLGQIGDEFADLFSAAKKLYDSVLLSGILTVTDLSTKAPLSASMIQRYDEHREDLKQLKQFVKASLPEKYQEIFADSSKDGYAGYIEGKTNQEAFYKYLSKLLTKQEDSEYFLEKIKNEDFLRKQRTFDNGSIPHQVHLTELKAIIRRQSEYYPFLKENQDKIEKILTFRIPYYVGPLARGNSDFAWMTRKTDDSIRPWNFEDLVDKEKSAEAFIHRMTNNDLYLPEEKVLPKHSLIYEKFTVYNELTKVRYKNEQGETYFFDSNVKQEIFDGVFKEHRKVSKKQLLDFLAKEFEEFRIVDVTGLDKENKAFNASLGTYHDLKKILDKDFLDNPDNESILEDIVQTITLFEDREMIKKRLENYKDLFTESQLKKLYRRHYTGWGRLSAKLINGIRDRESQKTILDYLISDGRANRNFMQLINDDGLSFKSIISKAQSGSHSDNLKEVVGELAGSPAIKKGILQSLKIVDELVKVMGYEPEQIVVEMARENQTTNQGRRNSRQRYKLLEDGVKNLASDLNGDILKEYPTDNQALQNERLFLYYLQNGRDMYTGEALDIDNLSQYDIDHIVPQAFIKDDSIDNRVLVSSAKNRGKSDDVPSIDIVKARKAFWKKLLDAKLISQRKYDNLTKAERGGLTPDDKAGFIQRQLVETRQITKHVARILDERFNNKVDDNNKPIRKVKIVTLKSNLVSNFRKEFGFYKIREVNNYHHAHDAYLNAVVAKAILTKYPQLEPEFVYGDYPKYNSYKTRKSATEKLFFYSNIMNFFKTKVTLADETVVVKDDIEVNNETGEIAWDKKKHFATVRKVLSYPQVNIVKKTEVQTGGFSKESILAHSNSDKLIPRKTKDIYLDPKKYGGFDSPIVAYSVLVLADIKKGKAQKLKTVKELIGITIMERERFEKNPSAFLESKGYLNIRTDKLIILPKYSLFELENGRRRLLASAGELQKGNELALPTQYMKFLYLASRYNESKGKPEEIEKKQEFVNQHVSYFDDILQLINDFSKRVILADANLEKINKLYSDNKDNTPVDELAKNIINLFTFTSLGAPAAFKFFDKSVDRKRYTSTKEVLDSTLIHQSITGLYETRIDLGKLGED

SEQ ID NO: 643 - protein, 1370 aa, Streptococcus agalactiae
MNKPYSIGLDIGTNSVGWSIITDDYKVPAKKMRVLGNTDKEYIKKNLIGALLFDGGNTAADRRLKRTARRRYTRRRNRILYLQEIFAEEMSKVDDSFFHRLEDSFLVEEDKRGSKYPIFATMQEEKDYHEKFPTIYHLRKELADKKEKADLRLVYLALAHIIKFRGHFLIEDDRFDVRNTDIQKQYQAFLEIFDTSFENNHLLSQNVDVEAILTDKISKSAKKDRILAQYPNQKSTGIFAEFLKLIVGNQADFKKHFNLEDKTPLQFAKDSYDEDLENLLGQIGDEFADLFSAAKKLYDSVLLSGILTVTDLSTKAPLSAYMIQRYDEHREDLKQLKQFVKASLPEKYQEIFADSSKDGYAGYIEGKTNQEAFYKYLSKLLTKQEDSEYFLEKIKNEDFLRKQRTFDNGSIPHQVHLTELKAIIRRQSEYYPFLKENQDKIEKILTFRIPYYVGPLARGNSDFAWMTRKTDDSIRPWNFEDLVDKEKSAEAFIHRMTNNDLYLPEEKVLPKHSLIYEKFTVYNELTKVRYKNEQGETYFFDSNVKQEIFDGVFKEHRKVSKKQLLDFLAKEFEEFRIVDVTGLDKENKAFNASLGTYHDLKKILDKDFLDNPDNESILEDIVQTITLFEDREMIKKRLENYKDLFTESQLKKLYRRHYTGWGRLSAKLINGIRDRESQKTILDYLISDGRANRNFMQLINDDGLSFKSIISKAQSGSHSDNLKEVVGELAGSPAIKKGILQSLKIVDELVKVMGYEPEQIVVEMARENQTTNQGRRNSRQRYKLLEDGVKNLASDLNGDILKEYPTDNQALQNERLFLYYLQNGRDMYTGEALDIDNLSQYDIDHIVPQAFIKDDSIDNRVLVSSAKNRGKSDDVPSIDIVKARKAFWKKLLDAKLISQRKYDNLTKAERGGLTPDDKAGFIQRQLVETRQITKHVARILDERFNNKVDDNNKPIRKVKIVTLKSNLVSNFRKEFGFYKIREVNNYHHAHDAYLNAVVAKAILTKYPQLEPEFVYGDYPKYNSYKTRKSATEKLFFYSNIMNFFKTKVTLADETVVVKDDIEVNNETGEIAWDKKKHFATVRKVLSYPQVNIVKKTEVQTGGFSKESILAHSNSDKLIPRKTKDIYLDPKKYGGFDSPIVAYSVLVLADIKKGKAQKLKTVKELIGITIMERERFEKNPSAFLESKGYLNIRTDKLIILPKYSLFELENGRRRLLASAGELQKGNELALPTQYMKFLYLASRYNESKGKPEEIEKKQEFVNQHISYFDDILQLINDFSKRVILADANLEKINKLYSDNKDNTPVDELAKNIINLFTFTSLGAPAAFKFFDKSVDRKRYTSTKEVLDSTLIHQSITGLYETRIDLGKLGED

SEQ ID NO: 644 - protein, 1378 aa, Streptococcus agalactiae
MNKPYSIGLDIGTNSVGWSIITDDYKVPAKKMRVLGNTDKEYIKKNLIGALLFDGGNTAADRRLKRTARRRYTRRRNRILYLQEIFAEEMSKVDDSFFHRLEDSFLVEEDKRGSKYPIFATMQEEKYYHEKFPTIYHLRKELADKKEKADLRLIYLALAHIIKFRGHFLIEDDRFDVRNTDIQKQYQAFLEIFDTTFENNDLLSQNVDVEAILTDKISKSAKKDRILARYPNQKSTGIFAEFLKLIVGNQADFKKHFNLEDKTPLQFAKDSYDEDLENLLGQIGDEFADLFSAAKKLYDSVLLSGILTVIDLSTKAPLSASMIQRYDEHHEDLKHLKQFVKASLPENYREVFADSSKDGYAGYIEGKTSQEAFYKYLLKLLTKQEGSEYLLEKIKNEDFLRKQRTFDNGSIPHQVHLTELRAIIRRQSEYYPFLKENLDRIEKILTFRIPYYVGPLAREKSDFAWMTRKTDDSIRPWNFEDLVDKEKSAEAFIHRMTNNDLYLPEEKVLPKHSLIYEKFTVYNELTKVRFLAEGFKDFQFLNRKQKETIFNSLFKEKRKVTEKDIISFLNKVDGYEGIAIKGIEKQFNASLSTYHDLKKILGKDFLDNTDNELILEDIIQTLTLFEDREMIKKRLDIYKDFFTESQLKKLYRRHYTGWGRLSAKLINGIRNKENQKTILDYLIDDGSANRNFMQLIKDAGLSFKPIIDKARTGSHSDNLKEVVGELAGSPAIKKGILQSLKIVDELVKVMGYEPEQIVVEMARENQTTAKGLSRSRQRLTTLRESLGNLKSNILEEKKPKYVKDQVENHHLSDDRLFLYYLQNGKDMYTDDELDIDNLSQYDIDHIIPQAFIKDDSIDNRVLVSSAKNRGKSDDVPSIEIVKARKMFWKNLLDAKLMSQRKYDNLTKAERGGLTSDDKARFIQRQLVETRQITKHVARILDERFNNELDSKGRRIRKVKIVTLKSNLVSNFRKEFGFYKIREVNNYHHAHDAYLNAVVAKAILTKYPQLEPEFVYGLYRRKKLSKIVREDKEEKYSEATRKMFFYSNLMNMFKRVVRLADGSIVVRPVIETGRYMGKTAWDKKKHFATVRKVLSYPQNNIVKKTEIQTGGFSKESILAHGNSDKLIPRKTKDIYLDPKKYGGFDSPIVAYSVLVVADIKKGKAQKLKTVTELLGITIMERSRFEKNTSAFLESKGYLNIRDDKLMILPKYSLFELENGRRRLLASAGELQKGNELALPTQFMKFLYLASRYNESKGKPEEIEKKQEFVNQHVSYFDDILQLINDFSNRVILADANLEKINKLYQDNKENIPVDELANNIINLFTFTSLGAPAAFKFFDKIVDRKRYTSTKEVLNSTLIHQSITGLYETRIDLGKLGEG

SEQ ID NO: 645 - protein, 1370 aa, Streptococcus agalactiae
MNKPYSIGLDIGTNSVGWSIITDDYKVPAKKMRVLGNTDKEYIKKNLIGALLFDGGNTAADRRLKRTARRRYTRRRNRILYLQEIFAEEMSKVDDSFFHRLEDSFLVEEDKRGSKYPIFATMQEEKYYHEKFPTIYHLRKELADKKEKADLRLIYLALAHIIKFRGHFLIEDDRFDVRNTDIQKQYQAFLEIFDTTFENNDLLSQNVDVEAILTDKISKSAKKDRILARYPNQKSTGIFAEFLKLIVGNQADFKKHFNLEDKTPLQFAKDSYDEDLENLLGQIGDEFADLFSAAKKLYDSVLLSGILTVTDLSTKAPLSASMIQRYDEHREDLKQLKQFVKASLPEKYQEIFADSSKDGYAGYIEGKTNQEAFYKYLSKLLTKQEGSEYLLEKIKNEDFLRKQRTFDNGSIPHQVHLTELRAIIRRQSEYYPFLKENLDRIEKILTFRIPYYVGPLAREKSDFAWMTRKTDDSIRPWNFEDLVDKEKSAEAFIHRMTNNDLYLPEEKVLPKHSLIYEKFTVYNELTKVRFLAEGFKDFQFLNRKQKETIFNSLFKEKRKVTEKDIISFLNKVDGYEGIAIKGIEKQFNASLSTYHDLKKILGKDFLDNTDNELILEDIVQTLTLFEDREMIRKRLDIYKDFFTESQLKKLYRRHYTGWGRLSAKLINGIRNKENQKTILDYLIDDGSANRNFMQLIKDAGLSFKPIIDKARTGSHSDNLKEVVGELAGSPAIKKGILQSLKIVDELVKVMGYEPEQIVVEMARENQTTAKGLSRLRQRLTTLRESLANLKSNILEEKKPKYVKDQVENHHLSDDRLFLYYLQNGKDMYTDDELDIDNLSQYDIDHIIPQAFIKDDSIDNRVLVSSAKNRGKSDDVPSVEIVKDCKVFWKKLLDAKLMSQRKYDNLTKAERGGLTSDDKARFIQRQLVETRQITKHVARILDERFNNELDSKGRRIRKVKIVTLKSNLVSNFRKEFGFYKIREVNNYHHAHDAYLNAVVAKAILTKYPQLEPEFVYGDYPKYNSYKTRKSATEKLFFYSNIMNFFKTKVTLADGTVVVKDDIEVNNDTGEIVWDKKKHFATVRKVLSYPQVNIVKKTEIQTGGFSKESILAHGNSDKLIPRKTKDIYLDPKKYGGFDSPIVAYSVLVVADIKKGKAQKLKTVTELLGITIMERSRFEKNPSAFLESKGYLNIRDDKLMILPKYSLFELENGRRRLLASADELQKGNELALPTQFMKFLYLASRYNELKGKPEEIEQKQEFVVQHVSYFDDILQIINDFSNRVILADANLEKINKLYQDNKENIPVDELANNIINLFTFTSLGAPAAFKFFDKIVDRKRYTSTKEVLNSTLIHQSITGLYETRIDLGKLGED

SEQ ID NO: 646 - protein, 1377 aa, Streptococcus agalactiae
MNKPYSIGLDIGTNSVGWSIITDDYKVPAKKMRVLGNTDKEYIKKNLIGALLFDGGNTAADRRLKRTARRRYTRRRNRILYLQEIFAEEMSKVDDSFFHRLEDSFLVEEDKRGSKYPIFATMQEEKYYHEKFPTIYHLRKELADKKEKADLRLVYLALAHIIKFRGHFLIEDDRFDVRNTDIQKQYQAFLEIFDTTFENNHLLSQNVDVEAILTDKISKSAKKDRILAQYPNQKSTGIFAEFLKLIVGNQADFKKHFNLEDKTPLQFAKDSYDEDLENLLGQIGDEFADLFSVAKKLYDSVLLSGILTVTDLSTKAPLSASMIQRYDEHHEDLKHLKQFVKASLPENYREVFADSSKDGYAGYIEGKTNQEAFYKYLLKLLTKQEGSEYFLEKIKNEDFLRKQRTFDNGSIPHQVHLTELRAIIRRQSEYYPFLKENQDRIEKILTFRIPYYVGPLAREKSDFAWMTRKTDDSIRPWNFEDLVDKEKSAEAFIHRMTNNDLYLPEEKVLPKHSLIYEKFTVYNELTKVRFLAEGFKDFQFLNRKQKETIFNSLFKEKRKVTEKDIISFLNKVDGYEGIAIKGIEKQFNASLSTYHDLKKILGKDFLDNTDNELILEDIVQTLTLFEDREMIKKCLDIYKDFFTESQLKKLYRRHYTGWGRLSAKLINGIRNKENQKTILDYLIDDGSANRNFMQLINDDDLSFKPIIDKARTGSHSDNLKEVVGELAGSPAIKKGILQSLKIVDELVKVMGYEPEQIVVEMARENQTTAKGLSRSRQRLTTLRESLANLKSNILEEKKPKYVKDQVENHHLSDDRLFLYYLQNGRDMYTKKALDIDNLSQYDIDHIIPQAFIKDDSIDNRVLVSSAKNRGKSDDVPSIEIVKARKMFWKNLLDAKLMSQRKYDNLTKAERGGLTSDDKARFIQRQLVETRQITKHVARILDERFNNEVDNGKKICKVKIVTLKSNLVSNFRKEFGFYKIREVNDYHHAHDAYLNAVVAKAILTKYPQLEPEFVYGMYRQKKLSKIVHEDKEEKYSEATRKMFFYSNLMNMFKRVVRLADGSIVVRPVIETGRYMGKTAWDKKKHFATVRKVLSYPQNNIVKKTEIQTGGFSKESILAHGNSDKLIPRKTKDIYLDPKKYGGFDSPIVAYSVLVVADIKKGKAQKLKTVTELLGITIMERSRFEKNPSAFLESKGYLNIRDDKLMILPKYSLFELENGRRRLLASAGELQKGNELALPTQFMKFLYLASRYNESKGKPEEIEKKQEFVNQHVSYFDDILQLINDFSKRVILADANLEKINKLYQDNKENIPVDELANNIINLFTFTSLGAPAAFKFFDKIVDRKRYTSTKEVLNSTLIHQSITGLYETRIDLGKLGED

SEQ ID NO: 647 - protein, 1370 aa, Streptococcus agalactiae
  misc_feature (117)..(117): Xaa can be any naturally occurring amino acid
MNKPYSIGLDIGTNSVGWSIITDDYKVPAKKMRVLGNTDKEYIKKNLIGALLFDGGNTAADRRLKRTARRRYTRRRNRILYLQEIFAEEMSKVDDSFFHRLEDSFLVEEDKRGSKYXIFATLQEEKDYHEKFSTIYHLRKELADKKEKADLRLIYIALAHIIKFRGHFLIEDDSFDVRNTDISKQYQDFLEIFNTTFENNDLLSQNVDVEAILTDKISKSAKKDRILAQYPNQKSTGIFAEFLKLIVGNQADFKKYFNLEDKTPLQFAKDSYDEDLENLLGQIGDEFADLFSAAKKLYDSVLLSGILTVIDLSTKAPLSASMIQRYDEHREDLKQLKQFVKASLPEKYQEIFADSSKDGYAGYIEGKTNQEAFYKYLSKLLTKQEDSENFLEKIKNEDFLRKQRTFDNGSIPHQVHLTELKAIIRRQSEYYPFLKENQDRIEKILTFRIPYYIGPLAREKSDFAWMTRKTDDSIRPWNFEDLVDKEKSAEAFIHRMTNNDFYLPEEKVLPKHSLIYEKFTVYNELTKVRYKNEQGETYFFDSNIKQEIFDGVFKEHRKVSKKKLLDFLAKEYEEFRIVDVIGLDKENKAFNASLGTYHDLEKILDKDFLDNPDNESILEDIVQTLTLFEDREMIKKRLENYKDLFTESQLKKLYRRHYTGWGRLSAKLINGIRDKESQKTILDYLIDDGRSNRNFMQLINDDGLSFKSIISKAQAGSHSDNLKEVVGELAGSPAIKKGILQSLKIVDELVKVMGYEPEQIVVEMARENQTTNQGRRNSRQRYKLLDDGVKNLASDLNGNILKEYPTDNQALQNERLFLYYLQNGRDMYTGEALDIDNLSQYDIDHIIPQAFIKDDSIDNRVLVSSAKNRGKSDDVPSLEIVKDCKVFWKKLLDAKLMSQRKYDNLTKAERGGLTSDDKARFIQRQLVETRQITKHVARILDERFNNELDSKGRRIRKVKIVTLKSNLVSNFRKEFGFYKIREVNNYHHAHDAYLNAVVAKAILTKYPQLEPEFVYGDYPKYNSYKTRKSATEKLFFYSNIMNFFKTKVTLADGTVVVKDDIEVNNDTGEIVWDKKKHFATVRKVLSYPQNNIVKKTEIQTGGFSKESILAHGNSDKLIPRKTKDIYLDPKKYGGFDSPIVAYSVLVVADIKKGKAQKLKTVTELLGITIMERSRFEKNPSAFLESKGYLNIRADKLIILPKYSLFELENGRRRLLASAGELQKGNELALPTQFMKFLYLASRYNESKGKPEEIEKKQEFVNQHVSYFDDILQLINDFSKRVILADANLEKINKLYQDNKENISVDELANNIINLFTFTSLGAPAAFKFFDKIVDRKRYTSTKEVLNSTLIHQSITGLYETRIDLGKLGED

SEQ ID NO: 648 - protein, 1370 aa, Streptococcus agalactiae
MNKPYSIGLDIGTNSVGYSVVTDDYKVPAKKMRVLGNTDKEYIKKNLIGALLFDGGNTASDRRLKRTARRRYTRRRNRILYLQEIFAEEMSKVDDSFFHRLEDSFLVEDDKRGSKYPIFATMQEEKDYHEKFPTIYHLRKELADKKEKADLRLVYLALAHIIKFRGHFLIEDDSFDVRNTDIQRQYQAFLEIFDTTFENNHLLSQNIDVEGILTDKISKSAKKDRILAQYPNQKSTGIFAEFLKLIVGNQADFKKHFNLEDKTPLQFAKDSYDEDLENLLGQIGDEFADLFSVAKKLYDSVLLSGILTVTDLSTKAPLSASMIQRYDEHREDLKQLKQFVKASLPEKYQEIFTDSSKDGYAGYIEGKTNQGAFYKYLSKLLTKQEGSEYFLEKIKNEDFLRKQRTFDNGSIPHQVHLTELKAIIRRQSEYYPFLKENLDRIEKILTFRIPYYVGPLAREKSDFAWMTRKTDDSIRPWNFEELVDKEASAEAFIHRMTNNDLYLPEEKVLPKHSLIYEKFTVYNELTKVRYKNEQGETYFFDSNIKQEIFDGVFKEHRKVSKKKLLDFLAKEYEEFRIVDVIGLDKENKAFNASLGTYHDLKKILDKDFLDNPDNESILEDIVQTLTLFEDREMIKKRLENYKDLFTESQLKKLYRRHYTGWGRLSAKLINGIRDKESQKTILDYLISDGRANRNFMQLIHDDGLSFKPIIDKAQAGSHSDNLKEVVGELAGSPAIKKGILQSLKIVDELVKVMGYEPEQVVVEMARENQTTNQGRRNTRQRYKLLEEGVKNLASDLNGNILKEYPTDNQALQNERLFLYYLQNGRDMYTGEALDIDNLSQYDIDHIVPQAFIKDDSIDNRVLVSSAKNRGKSDNVPSIDIVKARKAFWKKLLDAKLMSQRKYDNLTKAERGGLTSDDKARFIQRQLVETRQITKHVARILDERFNNELDSKGRRIRKVKIVTLKSNLVSNFRKEFGFYKIREVNDYHHAHDAYLNAVVAKAILTKYPQLEPEFVYGDYPKYNSYKTRKSATEKLFFYSNIMNFFKTKVTLADGTVVVKDDIEVNNDTGEIVWDKKKHFATVRKVLSYPQVNIVKKTEIQTGGFSKESILAHGNSDKLIPRKTKDIYLDPKKYGGFDSPIVAYSVLVVADIKKGKAQKLKTVTELLGITIMERFRFEKNPSAFLESKGYLNIRDDKLMILPKYSLFELENGRRRLLASAGELQKGNELALPTQYMKFLYLASRYNELKGKPEEIEQKQEFVVQHVSYFDDILQIINDFSNRVILADANLEKINKLYQDNKENISVDELANNIINLFTFTSLGAPAAFKFFDKIVDRKRYTSTKEVLNSTLIHQSITGLYETRIDLGKLGED

SEQ ID NO: 649 - protein, 1370 aa, Streptococcus agalactiae
MNKPYSIGLDIGTNSVGYSVVTDDYKVPAKKMRVLGNTDKEYIKKNLIGALLFDGGNTASDRRLKRTARRRYTRRRNRILYLQEIFAEEMSKVDDSFFHRLEDSFLVEDDKRGSKYPIFATMQEEKDYHEKFPTIYHLRKELADKKEKANLRLVYLALAHIIKFRGHFLIEDDSFDVRNTDIQRQYQAFLEIFDTTFENNHLLSQNIDVEGILTDKISKSAKKDRILAQYPNQKSTGIFAEFLKLIVGNQADFKKHFNLEDKTPLQFAKDSYDEDLENLLGQIGDEFADLFSVAKKLYDSVLLSGILTVTDLSTKAPLSASMIQRYDEHREDLKQLKQFVKASLPEKYQEIFTDSSKDGYAGYIEGKTNQGAFYKYLSKLLTKQEGSEYFLEKIKNEDFLRKQRTFDNGSIPHQVHLTELKAIIRRQSEYYPFLKENLDRIEKILTFRIPYYVGPLAREKSDFAWMTRKTDDSIRPWNFEELVDKEASAEAFIHRMTNNDLYLPEEKVLPKHSLIYEKFTVYNELTKVRYKNEQGETYFFDSNIKQEIFDGVFKEHRKVSKKKLLDFLAKEYEEFRIVDVIGLDKENKAFNASLGTYHDLKKILDKDFLDNPDNESILEDIVQTLTLFEDREMIKKRLENYKDLFTESQLKKLYRRHYTGWGRLSAKLINGIRDKESQKTILDYLISDGRANRNFMQLIHDDGLSFKPIIDKAQAGSHSDNLKEVVGELAGSPAIKKGILQSLKIVDELVKVMGYEPEQVVVEMARENQTTNQGRRNTRQRYKLLEEGVKNLASDLNGNILKEYPTDNQALQNERLFLYYLQNGRDMYTGEALDIDNLSQYDIDHIVPQAFIKDDSIDNRVLVSSAKNRGKSDNVPSIDIVKARKAFWKKLLDAKLMSQRKYDNLTKAERGGLTSDDKARFIQRQLVETRQITKHVARILDERFNNELDSKGRRIRKVKIVTLKSNLVSNFRKEFGFYKIREVNDYHHAHDAYLNAVVAKAILTKYPQLEPEFVYGDYPKYNSYKTRKSATEKLFFYSNIMNFFKTKVTLADGTVVVKDDIEVNNDTGEIVWDKKKHFATVRKVLSYPQVNIVKKTEIQTGGFSKESILAHGNSDKLIPRKTKDIYLDPKKYGGFDSPIVAYSVLVVADIKKGKAQKLKTVTELLGITIMERFRFEKNPSAFLESKGYLNIRDDKLMILPKYSLFELENGRRRLLASAGELQKGNELALPTQYMKFLYLASRYNELKGKPEEIEQKQEFVVQHVSYFDDILQIINDFSNRVILADANLEKINKLYQDNKENISVDELANNIINLFTFTSLGAPAAFKFFDKIVDRKRYTSTKEVLNSTLIHQSITGLYETRIDLGKLGED

SEQ ID NO: 650 - protein, 1370 aa, Streptococcus agalactiae
  misc_feature (9)..(9): Xaa can be any naturally occurring amino acid
MNKPYSIGXDIGTNSVGWSIITDDYKVPAKKMRVLGNTDKEYIKKNLIGALLFDGGNTAADRRLKRTARRRYTRRRNRILYLQEIFAEEMSKVDDSFFHRLEDSFLVEEDKRGSKYPIFATLQEEKDYHEKFSTIYHLRKELADKKEKADLRLIYIALAHIIKFRGHFLIEDDSFDVRNTDISKQYQDFLEIFNTTFENNDLLSQNVDVEAILTDKISKSAKKDRILAQYPNQKSTGIFAEFLKLIVGNQADFKKYFNLEDKTPLQFAKDSYDEDLENLLGQIGDEFADLFSAAKKLYDSVLLSGILTVIDLSTKAPLSASMIQRYDEHREDLKQLKQFVKASLPEKYQEIFADSSKDGYAGYIEGKTNQEAFYKYLSKLLTKQEDSENFLEKIKNEDFLRKQRTFDNGSIPHQVHLTELKAIIRRQSEYYPFLKENQDRIEKILTFRIPYYIGPLAREKSDFAWMTRKTDDSIRPWNFEDLVDKEKSAEAFIHRMTNNDFYLPEEKVLPKHSLIYEKFTVYNELTKVRYKNEQGETYFFDSNIKQEIFDGVFKEHRKVSKKKLLDFLAKEYEEFRIVDVIGLDKENKAFNASLGTYHDLEKILDKDFLDNPDNESILEDIVQTLTLFEDREMIKKRLENYKDLFTESQLKKLYRRHYTGWGRLSAKLINGIRDKESQKTILDYLIDDGRSNRNFMQLINDDGLSFKSIISKAQAGSHSDNLKEVVGELAGSPAIKKGILQSLKIVDELVKVMGYEPEQIVVEMARENQTTNQGRRNSRQRYKLLDDGVKNLASDLNGNILKEYPTDNQALQNERLFLYYLQNGRDMYTGEALDIDNLSQYDIDHIIPQAFIKDDSIDNRVLVSSAKNRGKSDDVPSLEIVKDCKVFWKKLLDAKLMSQRKYDNLTKAERGGLTSDDKARFIQRQLVETRQITKHVARILDERFNNELDSKGRRIRKVKIVTLKSNLVSNFRKEFGFYKIREVNNYHHAHDAYLNAVVAKAILTKYPQLEPEFVYGDYPKYNSYKTRKSATEKLFFYSNIMNFFKTKVTLADGTVVVKDDIEVNNDTGEIVWDKKKHFATVRKVLSYPQNNIVKKTEIQTGGFSKESILAHGNSDKLIPRKTKDIYLDPKKYGGFDSPIVAYSVLVVADIKKGKAQKLKTVTELLGITIMERSRFEKNPSAFLESKGYLNIRADKLIILPKYSLFELENGRRRLLASAGELQKGNELALPTQFMKFLYLASRYNESKGKPEEIEKKQEFVNQHVSYFDDILQLINDFSKRVILADANLEKINKLYQDNKENISVDELANNIINLFTFTSLGAPAAFKFFDKIVDRKRYTSTKEVLNSTLIHQSITGLYETRIDLGKLGED

SEQ ID NO: 651 - protein, 1125 aa, Streptococcus anginosus
MNGLVLGLDIGIASVGVGILNKETGEIIHANSRIFPAATADSNVERRGFRQGRRLGRRKKHRSARLNNLFEEFGFITDFSAIPLNLNPYALRVKGLSEELTNEELFIALKNIIKRRGISYLDDASEDGETASNEYGKAVEENRKLLADKTPGQIQLERFEKYGQVRGDFTVVENGENHRLINVFSTSAYKKEAERILRRQQEFNVRISDEFIEAYLTILTGKRKYYHGPGNEKSRTDYGRFRTDGTTLDNIFGILIGKCTFYPDEYRAAKASYTAQEFNLLNDLNNLTVPTETKKLSPEQKRQIVEYARTAKTLGTPTLLKYIAKLVDGSIDDIKGYRIDKSDKPEMHTFDAYRKMRTLDLVNIDALSRETLDDLAHILTLNTESEGILEALNSKMPSTFTKEQIDELIQFRKKNSAVFGKGWHNFSLKLMNELISELYETSEEQMTILTRLGKQRSREISKRTKYIDEKELTEEIYNPVVAKSVRQAIKIINEATKRYGIFDNIVIEMARENNEEDAKKDYIKRQKANQDEKNASMEKAAFQYNGKKELPDSIFHGHKELATKIRLWHQQGERCLYTGKNISIRDLIHNPHQYEIDHILPLSLSFDDGLANKVLVLATANQEKGQRTPFQAIDSMDDAWSYREFKQYVRNSKSLSNKKKDYLLTEEDISKIEVKQKFIERNLVDTRYSSRVVLNTLQEFYKTNDFDTKISVVRGQFTSQLRRKWKIEKSRDTYHHHAVDALIIAASSQLRLWKKQNNPLISYKEGQFVDPETGEILSLTDDEYKELVFRPPYDYFVDTLKSKSFEDSILFSYQVDSKYNRKISDATIYGTRKAQLGKDKQEETYVLGKIKDIYSQKGYEDFIKRYNKDETQFLIYHKDPQTFEKVIEEILKTYPDKELNEKGKEIPCNPFEKYRQENGPIRKYSKKGKGPEIKSLKYYDNKLGNHIDITPVNSQNQVVLQSLKPWRTDVYFNPRTSKYELMGLKYSDLRFEKGSGSYGISPEKYNKVKAKEGVNEDSEFKFTLYKNDLILIKDTETGEQQLFRYGSRNDTSKHYVELKPYEKAKFEGNQQLMNLLGTVAKGGQCLKGINKPNLSIYKVKTDVLGNKYFIKKEGDQPQLNFKKKF

SEQ ID NO: 652 - protein, 1386 aa, Streptococcus anginosus
MNQKYSIGLDIGTNSVGWAVITDDYKVPAKKMKVLGNTDKQSIKKNLLGALLFDSGETAEATRLKRTARRRYTRRRNRLRYLQEIFAEEMMQVDESFFQRLDDSFLVDEDKRGERHPIFGNIAAEVKYHDEFPTIYHLRKHLADISQKADLRLVYLALAHMIKFRGHFLIEGQLKAENTNVQALFKDFVEVYDKTVEESHLSEITVDALSILTEKVSKSRRLENLIAHYPAEKKNTLFGNLIALFLGLQPNFKTNFQLSEDAKLQFSKDTYEEDLEGLLGEVGDEYADLFASAKNLYDAILLSGILTVDDNSTKAPLSASMVKRYEEHQKDLKKFEDFIKVNALDQYNAIFKDKNKKGYAGYIESGVKQDEFYKYLKGILLQINGSGDFLDKIDREDFLRKQRTFDNGSIPHQIHLQEMHAILRRQGEHYPFLKENQDKIEKILTFRIPYYVGPLARKGSRFAWAEYKADEKITPWNFDDILDKEKSAEKFITRMTLNDLYLPEEKVLPKHSLLYETFTVYNELTKVKYVNEQGEAKFFDANMKQEIFDHVFKENRKVTKDKLLNYLNKEFEEFRIVNLTGLDKENKVFNSSLGTYHDLRKILNKSFLDNKENAQIIEDIIQTLTLFEDREMIRQRLQKYSDIFTKAQLKKLERRHYTGWGRLSYKLINGIRNKENKKTILDYLIDDGYANRNFMQLINDDALSFKEEIAKAQIIGDVDDIANVVHDLPGSPAIKKGILQSVKIVDELVKVMGHNPANIIIEMARENQTTDRGRRNSQQRLKLLQDSLKNLDNPVNIKNVENQQLQNDRLFLYYIQNGKDMYTGETLDINNLSQYDIDHIIPQAYIKDDSFDNRVLTSSSENRGKSDNVPSIEVVCARKADWMRLRKAGLISQRKFDNLTKAERGGLTENDKAGFIKRQLVETRQITKHVAQVLDARFNAKHDENKKVIRDVKIITLKSNLVSQFRKDFKFYKVREINDYHHAHDAYLNAVIGTALLKKYPKLASEFVYGEFKKYDVRKFIAKSDKEIGKATAKYFFYSNLMNFFKKEVKFADGTVVERPDIETSEDGEIAWNKQTDFKIVRKVLSYPQVNIVKKTEVQTHGLDRGKPRGLFNANPSPKPKPDSSENLVGVKRNLDPKKYGGYAGISNSYAVLVKAIIEKGVKKKETMVLEFQGISILDRITFEKDKRAFLLGKGYKDIKKIIELPKYSLFELKDGSRRMLASILSTNNKRGEIHKGNELFVPQKFTTLLYHAKRINNPINKDHIEYVKKHRDDFKELLNYVLEFNEKYVGATKNGERLKEAVADFDSKSNEEICTSFLGAVNSKNAGLFELTSLGSASDFEFLGVKIPRYRDYTPSSLLKDSTLIHQSITGLYETRIDLSKLGED

SEQ ID NO: 653 - protein, 1396 aa, Streptococcus anginosus
MTKPYSIGLDIGTNSVGWAVITDDYKVPAKKMKVLGNTNRDYIKKNLLGALLFDGGETAEGRRLKRTARRRYTRRKNRLRYLQEIFAEEMMQVDESFFQRLDDSFLVEEDKQGSKYPIFGTLKEEKEYHKKFKTIYHLREELANSKEKADLRLVYLALAHMIKFRGHFLYEGDLKAENTDVQALFKDFVEEYDKTIEESHLSEITVDALSILTEKVSKSSRLENLIAHYPTEKKNTLFGNLIALSLGLQANFKTNFQLSEDAKLQFSKDTYEEDLEGLLGEVGDEYADLFVSAKNLYDAILLSGILTVDDNSTKAPLSASMVKRYKEHKEELAAFKRFIKEKLPKKYEEIFKDDTKNGYAGYVGADKKLRKRSGKLATEEEFYKYVKGILNKVEGADYFLDKIDREDFLRKQRTFDNGSIPHQIHLQEMHAILRRQGEHYPFLKENQDKIEKILTFRIPYYVGPLARKGSRFAWAEYKADEKITPWNFDDILDKEKSAEKFITRMTLNDLYLPEEKVLPKHSPLYETFTVYNELTKVKYVNEQGEAKFFDTNMKQEIFDHVFKENRKVTKDKLLNYLNKEFEEFRIVNLTGLDKENKAFNASLGTYHDLRKILDKSFLDDKVNEKIIEDIIQTLTLFEDREMIRQRLQKYSDIFTTQQLKELERRHYTGWGRLSYKLINGIRNKENKKTILDYLIDDGYANRNFMQLINDDALSFKEEIARAQIIGDVDDIANVVHDLPGSPAIKKGILQSVKIVDELVKVMGHNPTNIIIEMARENQTTDKGRRNSQQRLKLLQDSLKNLDNPVNIKNVENQQLQNDRLFLYYIQNGKDMYTGETLDINNLSQYDIDHIIPQAFIKDNSLDNRVLTRSDKNRGKSDDVPSIEVVHEMKSFWSKLLSVKLITQRKFDNLTKAERGGLTENDKAGFIKRQLVETRQITKHVAQVLDARFNAKHDENKKVIRDVKIITLKSNLVSQFRKDFKFYKVREINDYHHAHDAYLNAVIGTALLKKYPKLASEFVYGEFKKYDVRKFIAKSDKEIGKATAKYFFYSNLMNFFKKEVKFADGTVVERPDIETSEDGEIAWNKQTDFKIVRKVLSYPQVNIVKKTEVQTHGLDRGKPRGLFNANPSPKPKPDSSENLVGIKRNLDPKKYGGYAGISNSYAVLVKAIIEKGVKKKETMVLEFQGISILDRITFEKDKRAFLLGKGYKDIKKIIELPKYSLFELKDGSRRMLASILSTNNKRGEIHKGNELFVPQKFTTLLYHAKRINNPINKDHIEYVKKHRDDFKELLNYVLEFNEKYVGATKNGERLKEAVADFDSKSNEEICTSFLGAVNSKNAGLFELTSLGSASDFEFLGVKIPRYRDYTPSSLLKDSILIHQSITGLYETRIDLSKLGED

SEQ ID NO: 654 - protein, 1375 aa, Streptococcus canis
MEKKYSIGLDIGTNSVGWAVITDDYKVPSKKFKVLGNTNRKSIKKNLMGALLFDSGETAEATRLKRTARRRYTRRKNRIRYLQEIFANEMAKLDDSFFQRLEESFLVEEDKKNERHPIFGNLADEVAYHRNYPTIYHLRKKLADSPEKADLRLIYLALAHIIKFRGHFLIEGKLNAENSDVAKLFYQLIQTYNQLFEESPLDEIEVDAKGILSARLSKSKRLEKLIAVFPNEKKNGLFGNIIALALGLTPNFKSNFDLTEDAKLQLSKDTYDDDLDELLGQIGDQYADLFSAAKNLSDAILLSDILRSNSEVTKAPLSASMVKRYDEHHQDLALLKTLVRQQFPEKYAEIFKDDTKNGYAGYVGIGIKHRKRTTKLATQEEFYKFIKPILEKMDGAEELLAKLNRDDLLRKQRTFDNGSIPHQIHLKELHAILRRQEEFYPFLKENREKIEKILTFRIPYYVGPLARGNSRFAWLTRKSEEAITPWNFEEVVDKGASAQSFIERMTNFDEQLPNKKVLPKHSLLYEYFTVYNELTKVKYVTERMRKPEFLSGEQKKAIVDLLFKTNRKVTVKQLKEDYFKKIECFDSVEIIGVEDRFNASLGTYHDLLKIIKDKDFLDNEENEDILEDIVLTLTLFEDREMIEERLKTYAHLFDDKVMKQLKRRHYTGWGRLSRKMINGIRDKQSGKTILDFLKSDGFSNRNFMQLIHDDSLTFKEEIEKAQVSGQGDSLHEQIADLAGSPAIKKGILQTVKIVDELVKVMGHKPENIVIEMARENQTTTKGLQQSRERKKRIEEGIKELESQILKENPVENTQLQNEKLYLYYLQNGRDMYVDQELDINRLSDYDVDHIVPQSFIKDDSIDNKVLTRSVENRGKSDNVPSEEVVKKMKNYWRQLLNAKLITQRKFDNLTKAERGGLSEADKAGFIKRQLVETRQITKHVARILDSRMNTKRDKNDKPIREVKVITLKSKLVSDFRKDFQLYKVRDINNYHHAHDAYLNAVVGTALIKKYPKLESEFVYGDYKVYDVRKMIAKSEQEIGKATAKRFFYSNIMNFFKTEVKLANGEIRKRPLIETNGETGEVVWNKEKDFATVRKVLAMPQVNIVKKTEVQTGGFSKESILSKRESAKLIPRKKGWDTRKYGGFGSPTVAYSILVVAKVEKGKAKKLKSVKVLVGITIMEKGSYEKDPIGFLEAKGYKDIKKELIFKLPKYSLFELENGRRRMLASATELQKANELVLPQHLVRLLYYTQNISATTGSNNLGYIEQHREEFKEIFEKIIDFSEKYILKNKVNSNLKSSFDEQFAVSDSILLSNSFVSLLKYTSFGASGGFTFLDLDVKQGRLRYQTVTEVLDATLIYQSITGLYETRTDLSQLGGD

SEQ ID NO: 655 - protein, 1345 aa, Streptococcus constellatus
MGKPYSIGLDIGTNSVGWAVVTDDYKVPAKKMKVLGNTDKQSIKKNLLGALLFDSGETAEATRLKRTARRRYTRRKNRLRYLQEIFTGEMNKVDENFFQRLDDSFLVDEDKRGEHHPIFGNIAAEVKYHDDFPTIYHLRRHLADTSKKADLRLVYLALAHMIKFRGHFLYEGDLKAENTDVQALFKDFVEEYDKTIEESHLSEITVDALSILTEKVSKSSRLENLIAHYPTEKKNTLFGNLIALSLDLHPNFKTNFQLSEDAKLQFSKDTYEEDLEGFLGEVGDEYADLFASAKNLYDAILLSGILTVDDNSTKAPLSASMVKRYEEHQKDLKKLKDFIKVNAPDQYNAIFKDKNKKGYASYIESGVKQDEFYKYLKGILLKINGSGDFLDKIDREDFLRKQRTFDNGSIPHQIHLQEMHAILRRQGEHYPFLKENQDKIEKILTFRIPYYVGPLARKGSRFAWAEYKADEKITPWNFDDILDKEKSAEKFITRMTLNDLYLPEEKVLPKHSPLYEAFTVYNELTKVKYVNEQGEAKFFDTNMKQEIFDHVFKENRKVTKDKLLNYLNKEFEEFRIVNLTGLDKENKAFNSSLGTYHDLRKILDKSFLDDKANEKTIEDIIQTLTLFEDREMIRQRLQKYSDIFTKAQLKKLERRHYTGWGRLSYKLINGIRNKENKKTILDYLIDDGYANRNFMQLINDDALSFKEEIARAQIIDDVDDIANVVHDLPGSPAIKKGILQSVKIVDELVKVMGHNPANIIIEMARENQTTDKGRRNSQQRLKLLQDSLKNLDNPVNIKNVENQQLQNDRLFLYYIQNGKDMYTGETLDINNLSQYDIDHIIPQAFIKDNSLDNRVLTRSDKNRGKSDDVPSIEVVHEMKSFWSKLLSVKLITQRKFDNLTKAERGGLTEEDKAGFIKRQLVETRQITKHVAQILDERFNTEFDGNKRRIRNVKIITLKSNLVSNFRKEFELYKVREINDYHHAHDAYLNAVVGNALLLKYPQLEPEFVYGEYPKYNSYRSRKSATEKFLFYSNILRFFKKEDIQTNEDGEIAWNKEKHIKILRKVLSYPQVNIVKKTEEQTGGFSKESILPKGESDKLIPRKTKNSYWDPKKYGGFDSPVVAYSILVFADVEKGKSKKLRKVQDMVGITIMEKKRFEKNPVDFLEQRGYRNVRLEKIIKLPKYSLFELENKRRRLLASAKELQKGNELVIPQRFTTLLYHSYRIEKDYEPEHREYVEKHKDEFKELLEYISVFSRKYVLADNNLTKIEMLFSKNKDAEVSSLAKSFISLLTFTAFGAPAAFNFFGENIDRKRYTSVTECLNATLIHQSITGLYETRIDLSKLGED

SEQ ID NO: 656 - protein, 538 aa, Streptococcus dysgalactiae
DYDVDHIVPQSFIKDDSIDNKVLTRSDKNRGKSDNVPSEEVVKKMKNYWRQLLNAKLITQRKFDNLTKAERGGLSELDKAGFIKRQLVETRQITKHVAQILDSRMNTKYDENDKLIREVKVITLKSKLVSDFRKDFQFYKVREINNYHHAHDAYLNAVVGTALIKKYPKLESEFVYGDYKVYDVRKMIAKSEQEIGKATAKRFFYSNIMNFFKTEITLANGEIRKRPLIETNEETGEIVWDKGRDFATVRKVLSMPQVNIVKKTEVQTGALTNESIYARGSFDKLISRKHRFESSKYGGFGSPTVTYSVLVVAKSKVQDGKVKKIKTGKELIGITLLDKLVFEKNPLKFIEDKGYGNVQIDKCIRLPKYSLFEFENGTRRMLASVMANNNSRGDLQKANEMFLPAKLVTLLYHAHKIESSKELEHEAYILDHYNDLYQLLSYIERFASLYVDVEKNISKVKELFSNIESYSISEICSSVINLLTLTASGAPADFKFLGTTIPRKRYGSPQSILSSTLIHQSITGLYETRIDLSQLGGD

SEQ ID NO: 657 - protein, 1155 aa, Streptococcus dysgalactiae
MDKKYSIGLDIGTNSVGWAVITDDYKVPSKKFKVLGNTDRHSIKKNLIGALLFDSGETAEATRLKRSARRRYTRRKNRIRYLQEIFSSEMSKVDDSFFHRLEESFLVEEDKKHERHPIFGNIVDEVAYHEKYPTIYHLRKKLADSTDKADLRLIYLALAHMIKFRGHFLIEGDLNPDNSDMDKLFIQLVQTYNQLFEENPINASRVDAKAILSARLSKSRRLENLIAQLPGEKRNGLFGNLIALSLGLTPNFKSNFDLAEDAKLQLSKDTYDDDLDNLLAQIGDQYADLFLAAKNLSDAILLSDILRVNSEITKAPLSASMIKRYDEHHQDLTLLKALVRQQLPEKYKEIFFDQSKNGYAGYIDGGASQEEFYKFIKPILEKMDGTEELLAKLNREDLLRKQRTFDNGSIPHQIHLGELHAILRRQEDFYPFLKDNREKIEKILTFRIPYYVGPLARGNSRFAWMTRKSEETITPWNFEEVVDKGASAQSFIERMTNFDKNLPNEKVLPKHSLLYEYFTVYNELTKVKYVTEGMRKPEFLSGKQKEAIVDLLFKTNRKVTVKQLKEDYFKKIECFDSVEISGVEDRFNASLGTYHDLLKIIKDKDFLDNEENEDILEDIVLTLTLFEDKEMIEERLKTYAHLFDDKVMKQLKRRHYTGWGRLSRKLINGIRDKQSGKTILDFLKSDGFANRNFIQLIHDDSLTFKEAIQKAQVSGQGHSLHEQIANLAGSPAIKKGILQSVKVVDELVKVMGHKPENIVIEMARENQTTQKGQKNSRERMKRIEEGIKELGSQILKEHPVENTQLQNEKLYLYYLQNRRDMYVDQELDINRLSDYDVDHIVPQSFIKDDSIDNKVLTRSDKNRGKSDDVPSEEVVKKMKNYWRQLLNAKLITQRKFDNLTKAERGGLSELDKAGFIKRQLVETRQITKHVAQILDSRMNTKYDENDKLIREVKVITLKSKLVSDFRKDFQFYKVREINNYHHAHDAYLNAVVGTALIKKYPKLESEFVYGDYKVYDVRKMIAKSEQEIGKATAKRFFYSNIMNFFKTEITLANGEIRKRPLIETNEETGEIVWDKGRDFATVRKVLSMPQVNIVKKTEVQTGALTNESIYARGSFDKLISRKHRFESSKYGGFGSPTVTYSVLVVAKYQSYKMEK

SEQ ID NO: 658 - protein, 1371 aa, Streptococcus dysgalactiae
MDKKYSIGLDIGTNSVGWAVITDDYKVPSKKFKVLGNTDRHSIKKNLIGALLFDSGETAEATRLKRTARRRYTRRKNRIRYLQEIFSSEMSKVDDSFFHRLEESFLVEEDKKHERHPIFGNIVDEVAYHEKYPTIYHLRKKLADSTDKADLRLIYLALAHMIKFRGHFLIEGDLNPDNSDMDKLFIQLVQTYNQLFEENPINASRVDAKAILSARLSKSRRLENLIAQLPGEKRNGLFGNLIALSLGLTPNFKSNFDLAEDAKLQLSKDTYDDDLDNLLAQIGDQYADLFLAAKNLSDAILLSDILRVNSEITKAPLSASMIKRYDEHHQDLTLLKALVRQQLPEKYKEIFFDQSKNGYAGYIDGGASQEEFYKFIKPILEKMDGTEELLAKLNREDLLRKQRTFDNGSIPHQIHLGELHAILRRQEDFYPFLKDNREKIEKILTFRIPYYVGPLARGNSRFAWMTRKSEETITPWNFEEVVDKGASAQSFIERMTNFDKNLPNEKVLPKHSLLYEYFTVYNELTKVKYVTEGMRKPEFLSGKQKEAIVDLLFKTNRKVTVKQLKEDYFKKIECFDSVEISGVEDRFNASLGTYHDLLKIIKDKDFLDNEENEDILEDIVLTLTLFEDKEMIEERLKTYAHLFDDKVMKQLKRRHYTGWGRLSRKLINGIRDKQSGKTILDFLKSDGFANRNFIQLIHDDSLTFKEAIQKAQVSGQGHSLHEQIANLAGSPAIKKGILQSVKVVDELVKVMGHKPENIVIEMARENQTTQKGQKNSRERMKRIEEGIKELGSQILKEHPVENTQLQNEKLYLYYLQNGRDMYVDQELDINRLSDYDVDHIVPQSFIKDDSIDNKVLTRSDKNRGKSDDVPSEEVVKKMKNYWRQLLNAKLITQRKFDNLTKAERGGLSELDKAGFIKRQLVETRQITKHVAQILDSRMNTKYDENDKLIREVKVITLKSKLVSDFRKDFQFYKVREINNYHHAHDAYLNAVVGTALIKKYPKLESEFVYGDYKVYDVRKMIAKSEQEIGKATAKRFFYSNIMNFFKTEITLANGEIRKRPLIETNEETGEIVWNKGRDFATVRKVLSMPQVNIVKKTEVQTGALTNESIYARGSFDKLISRKHRFESSKYGGFGSPTVTYSVLVVAKSKVQDGKVKKIKTGKELIGITLLDKLVFEKNPLKFIEDKGYGNVQIDKCIKLPKYSLFEFENGTRRMLASVMANNNSRGDLQKANEMFLPAKLVTLLYHAHKIESSKELEHEAYILDHYNDLYQLLSYIERFASLYVDVEKNISKVKELFSNIESYSISEICSSVINLLTLTASGAPADFKFLGTTIPRKRYGSPQSILSSTLIHQSITGLYETRIDLSQLGGD

SEQ ID NO: 659 - protein, 1371 aa, Streptococcus dysgalactiae
MDKKYSIGLDIGTNSVGWAVITDDYKVPSKKFKVLGNTDRHSIKKNLIGALLFDSGETAEATRLKRTARRRYTRRKNRIRYLQEIFSSEMSKVDDSFFHRLEESFLVEEDKKHERHPIFGNIVDEVAYHEKYPTIYHLRKKLADSTDKADLRLIYLALAHMIKFRGHFLIEGDLNPDNSDMDKLFIQLVQTYNQLFEENPINASRVDAKAILSARLSKSRRLENLIAQLPGEKRNGLFGNLIALSLGLTPNFKSNFDLAEDAKLQLSKDTYDDDLDNLLAQIGDQYADLFLAAKNLSDAILLSDILRVNSEITKAPLSASMIKRYDEHHQDLTLLKALVRQQLPEKYKEIFFDQSKNGYAGYIDGGASQEEFYKFIKPILEKMDGTEELLAKLNREDLLRKQRTFDNGSIPHQIHLGELHAILRRQEDFYPFLKDNREKIEKILTFRIPYYVGPLARGNSRFAWMTRKSEETITPWNFEEVVDKGASAQSFIERMTNFDKNLPNEKVLPKHSLLYEYFTVYNELTKVKYVTEGMRKPEFLSGKQKEAIVDLLFKTNRKVTVKQLKEDYFKKIECFDSVEISGVEDRFNASLGTYHDLLKIIKDKDFLDNEENEDILEDIVLTLTLFEDKEMIEERLKKYANLFDDKVMKQLKRRHYTGWGRLSRKLINGIRDKQSGKTILDFLKSDGFANRNFMQLINDDSLTFKEAIQKAQVSGQGHSLHEQIANLAGSPAIKKGILQSVKVVDELVKVMGHKPENIVIEMARENQTTQKGQKNSRERMKRIEEGIKELGSQILKEHPVENTQLQNEKLYLYYLQNGRDMYVDQELDINRLSDYDVDHIVPQSFIKDDSIDNKVLTRSDKNRGKSDNVPSEEVVKKMKNYWRQLLNAKLITQRKFDNLTKAERGGLSELDKAGFIKRQLVETRQITKHVAQILDSRMNTKYDENDKLIREVKVITLKSKLVSDFRKDFQFYKVREINNYHHAHDAYLNAVVGTALIKKYPKLESEFVYGDYKVYDVRKMIAKSEQEIGKATAKRFFYSNIMNFFKTEITLANGEIRKRPLIETNEETGEIVWDKGRDFATVRKVLSMPQVNIVKKTEVQTGALTNESIYARGSFDKLISRKHRFESSKYGGFGSPTVTYSVLVVAKSKVQDGKVKKIKTGKELIGITLLDKLVFEKNPLKFIEDKGYGNVQIDKCIKLPKYSLFEFENGTRRMLASVMANNNSRGDLQKANEMFLPAKLVTLLYHAHKIESSKELEHEAYILDHYNDLYQLLSYIERFASLYVDVEKNISKVKELFSNIESYSISEICSSVINLLTLTASGAPADFKFLGTTIPRKRYGSPQSILSSTLIHQSITGLYETRIDLSQLGGD

SEQ ID NO: 660 - protein, 1371 aa, Streptococcus dysgalactiae
MDKKYSIGLDIGTNSVGWAVITDDYKVPSKKFKVLGNTDRHSIKKNLIGALLFDSGETAEATRLKRTARRRYTRRKNRIRYLQEIFSSEMSKVDDSFFHRLEESFLVEEDKKHERHPIFGNIVDEVAYHEKYPTIYHLRKKLADSTDKADLRLIYLALAHMIKFRGHFLIEGDLNPDNSDVDKLFIQLVQTYNQLFEEKPINASGVDAKAILSARLSKSKRLENLIAQLPGEKKNGLFGNLIALSLGLTPNFKSNFDLAEDAKLQLSKDTYDDDLDNLLAQIGNQYADLFLAAKNLSDAILLSDILRVNSEITKAPLSASMIKRYDEHHQDLTLLKALVRQQLPEKYKEIFFDQSKNGYAGYIDGGASQEEFYKFIKPILEKMDGTEELLAKLNREDLLRKQRTFDNGSIPHQIHLGELHAILRRQEDFYPFLKDNREKIEKILTFRIPYYVGPLARGNSRFAWMTRKSEETITPWNFEEVVDKGASAQSFIERMTNFDKNLPNEKVLPKHSLLYEYFTVYNELTKVKYVTEGMRKPEFLSGKQKEAIVDLLFKTNRKVTVKQLKEDYFKKIECFDSVEISGVEDRFNASLGTYHDLLKIIKDKDFLDNEENEDILEDIVLTLTLFEDKEMIEERLKKYANLFDDKVMKQLKRRHYTGWGRLSRKLINGIRDKQSGKTILDFLKSDGFANRNFMQLINDDSLTFKEAIQKAQVSGQGHSLHEQIANLAGSPAIKKGILQSVKVVDELVKVMGHKPENIVIEMARENQTTQKGQKNSRERMKRIEEGIKELGSQILKEHPVENTQLQNEKLYLYYLQNGRDMYVDQELDINRLSDYDVDHIVPQSFIKDDSIDNKVLTRSDKNRGKSDNVPSEEVVKKMKNYWRQLLNAKLITQRKFDNLTKAERGGLSELDKAGFIKRQLVETRQITKHVAQILDSRMNTKYDENDKLIREVKVITLKSKLVSDFRKDFQFYKVREINNYHHAHDAYLNAVVGTALIKKYPKLESEFVYGDYKVYDVRKMIAKSEQEIGKATAKRFFYSNIMNFFKTEITLANGEIRKRPLIETNEETGEIVWDKGRDFATVRKVLSMPQVNIVKKTEVQTGALTNESIYARGSFDKLISRKHRFESSKYGGFGSPTVTYSVLVVAKSKVQDGKVKKIKTGKELIGITLLDKLVFEKNPLKFIEDKGYGNVQIDKCIKLPKYSLFEFENGTRRMLASVMANNNSRGDLQKANEMFLPAKLVTLLYHAHKIESSKELEHEAYILDHYNDLYQLLSYIERFASLYVDVEKNISKVKELFSNIESYSISEICSSVINLLTLTASGAPADFKFLGTTIPRKRYGSPQSILSSTLIHQSITGLYETRIDLSQLGGD

SEQ ID NO: 661 - protein, 1370 aa, Streptococcus gallolyticus; identical to SEQ ID NO: 209

SEQ ID NO: 662 - protein, 1375 aa, Streptococcus infantarius
MEKSYSIGLDIGTNSVGWAVITDDYKVPAKKMKVLGNTDKKYIKKNLLGALLFDSGETAEVTRLKRTARRRYTRRKNRLRYLQEIFAKEMTKVDESFFQRLEESFLTDDDKTFDSHPIFGNKAEEDAYHQKFPTIYHLRKYLADSQEKADLRLVYLALAHMIKYRGHFLIEGELNAENTDVQKLFNVFVETYDKIVDESHLSEIEVDASSILTEKVSKSRRLENLIKQYPTEKKNTLFGNLIALALGLQPNFKTNFKLSEDAKLQFSKDTYEEDLEELLGKVGDDYADLFISAKNLYDAILLSGILTVDDNSTKAPLSASMIKRYVEHHEDLEKLKEFIKINKLKLYHDIFKDKTKNGYAGYIDNGVKQDEFYKYLKTILTKIDDSDYFLDKIERDDFLRKQRTFDNGSIPHQIHLQEMHSILRRQGDYYPFLKENQAKIEKILTFRIPYYVGPLARKDSRFAWANYHSDEPITPWNFDEVVDKEKSAEKFITRMTLNDLYLPEEKVLPKHSHVYETFTVYNELTKIKYVNEQGESFFFDANMKQEIFDHVFKENRKVTKAKLLSYLNNEFEEFRINDLIGLDKDSKSFNASLGTYHDLKKILDKSFLDDKTNGQIIEDIVLTLTLFEDRDMIHERLQKYSDFFTSQQLKKLERRHYTGWGRLSYKLINGIRNKENNKTILDFLIDDGHANRNFMQLINDESLSFKTIIQEAQVVGDVDDIEAVVHDLPGSPAIKKGILQSVKIVDELVKVMGDNPDNIVIEMARENQTTGYGRNKSNQRLKRLQDSLKEFGSDILSKKKPSYVDSKVENSHLQNDRLFLYYIQNGKDMYTGEELDIDRLSDYDIDHIIPQAFIKDNSIDNKVLTSSAKNRGKSDDVPSIEIVRNRRSYWYKLYKSGLISKRKFDNLTKAERGGLTEADKAGFIKRQLVETRQITKHVAQILDARFNTKRDENDKVIRDVKVITLKSNLVSQFRKEFKFYKVREINDYHHAHDAYLNAVVGTALLKKYPKLTPEFVYGEYKKYDVRKLIAKSSDDYSEMGKATAKYFFYSNLMNFFKTEVKYADGRVFERPDIETNADGEVVWNKQKDFDIVRKVLSYPQVNIVKKVEAQTGGFSKESILSKGDSDKLIPRKTKKVYWNTKKYGGFDSPTVAYSVLVVADIEKGKAKKLKTVKELVGISIMERSFFEENPVSFLEKKGYHNVQEDKLIKLPKYSLFEFEGGRRRLLASATELQKGNEVMLPAHLVELLYHAHRIDSFNSTEHLKYVSEHKKEFEKVLSCVENFSNLYVDVEKNLSKVRAAAESMTNFSLEEISASFINLLTLTALGAPADFNFLGEKIPRKRYTSTKECLSATLIHQSVTGLYETRIDLSKLGEE

SEQ ID NO: 663 - protein, 1368 aa, Streptococcus iniae
MRKPYSIGLDIGTNSVGWAVITDDYKVPSKKMRIQGTTDRTSIKKNLIGALLFDNGETAEATRLKRTTRRRYTRRKYRIKELQKIFSSEMNELDIAFFPRLSESFLVSDDKEFENHPIFGNLKDEITYHNDYPTIYHLRQTLADSDQKADLRLIYLALAHIIKFRGHFLIEGNLDSENTDVHVLFLNLVNIYNNLFEEDIVETASIDAEKILTSKTSKSRRLENLIAEIPNQKRNMLFGNLVSLALGLTPNFKTNFELLEDAKLQISKDSYEEDLDNLLAQIGDQYADLFIAAKKLSDAILLSDIITVKGASTKAPLSASMVQRYEEHQQDLALLKNLVKKQIPEKYKEIFDNKEKNGYAGYIDGKTSQEEFYKYIKPILLKLDGTEKLISKLEREDFLRKQRTFDNGSIPHQIHLNELKAIIRRQEKFYPFLKENQKKIEKLFTFKIPYYVGPLANGQSSFAWLKRQSNESITPWNFEEVVDQEASARAFIERMTNFDTYLPEEKVLPKHSPLYEMFMVYNELTKVKYQTEGMKRPVFLSSEDKEEIVNLLFKKERKVTVKQLKEEYFSKMKCFHTVTILGVEDRFNASLGTYHDLLKIFKDKAFLDDEANQDILEEIVWTLTLFEDQAMIERRLVKYADVFEKSVLKKLKKRHYTGWGRLSQKLINGIKDKQTGKTILGFLKDDGVANRNFMQLINDSSLDFAKIIKNEQEKTIKNESLEETIANLAGSPAIKKGILQSIKIVDEIVKIMGQNPDNIVIEMARENQSTMQGIKNSRQRLRKLEEVHKNTGSKILKEYNVSNTQLQSDRLYLYLLQDGKDMYTGKELDYDNLSQYDIDHIIPQSFIKDNSIDNTVLTTQASNRGKSDNVPNIETVNKMKSFWYKQLKSGAISQRKFDHLTKAERGALSDFDKAGFIKRQLVETRQITKHVAQILDSRFNSNLTEDSKSNRNVKIITLKSKMVSDFRKDFGFYKLREVNDYHHAQDAYLNAVVGTALLKKYPKLEAEFVYGDYKHYDLAKLMIQPDSSLGKATTRMFFYSNLMNFFKKEIKLADDTIFTRPQIEVNTETGEIVWDKVKDMQTIRKVMSYPQVNIVMKTEVQTGGFSKESIWPKGDSDKLIARKKSWDPKKYGGFDSPIIAYSVLVVAKIAKGKTQKLKTIKELVGIKIMEQDEFEKDPIAFLEKKGYQDIQTSSIIKLPKYSLFELENGRKRLLASAKELQKGNELALPNKYVKFLYLASHYTKFTGKEEDREKKRSYVESHLYYFDEIMQIIVEYSNRYILADSNLIKIQNLYKEKDNFSIEEQAINMLNLFTFTDLGAPSAFKFFNGDIDRKRYSSTNEIINSTLIYQSPTGLYETRIDLSKLGGK

SEQ ID NO: 664 - protein, 1392 aa, Streptococcus mitis
MNNNNYSIGLDIGTNSVGWAVITDDYKVPSKKMKVLGNTDKHFIKKNLIGALLFDEGATAEDRRFKRTARRRYTRRKNRLRYLQEIFSEEMSKVDSSFFHRLDDSFLVPEDKRGSKYPIFATLAEEKEYHKKFPTIYHLRKHLADSKEKTDLRLIYLALAHMIKYRGHFLYEESFDIKNNDIQKIFSEFISIYDNTFEGSSLSGQNAQVEAIFTDKISKSAKRERILKLFAYEKSTDLFSEFLKLIVGNQADFKKHFDLEEKAPLQFSKDTYDEDLENLLGQIGDDFADLFLVAKKLYDAILLSGILTVTDSSTKAPLSASMIERYENHQKDLAALKQFIQNNLQEKYDEVFSDQSKDGYARYINGKTTQEAFYKYIKNLLSKFEGSDYFLDKIEREDFLRKQRTFDNGSIPHQIHLQEMNAIIRRQGEHYPFLKEYKEKIETILTFRIPYYVGPLARGNRNFAWLTRNSDQAIRPWNFEEIVDQASSAEEFINKMTNYDLYLPEEKVLPKHSLLYETFAVYNELTKVKFISEGLRDYQFLDSGQKKQIVNQLFKEKRKVTEKDIIQYLHNVDGYDGIELKGIEKQFNASLSTYHDLLKIIKDKEFMDDPKNEEILENIVHTLTIFEDREMIKQRLAQYASIFDKKVIKALTRRHYTGWGKLSAKLINGICDKKTGKTILDYLIDDGYSNRNFMQLINDDGLSFKDIIQKAQVVGKTNDVKQVVQELPGSPAIKKGILQSIKLVDELVKVMGHAPESIVIEIARENQTTARGKKNSQQRYKRIEDALKNLAPGLDSNILKEHPTDNIQLQNDRLFLYYLQNGKDMYTGEALDINQLSSYDIDHIVPQAFIKDDSLDNRVLTSSKDNRGKSDNVPSLEVVQKRKAFWQQLLDSKLISEHKFNNLTKAERGGLDERDKVGFIRRQLVETRQITKHVAQILDARFNTEVNEKDKKNRTVKIITLKSNLVSNFRKEFKLYKVREINDYHHAHDAYLNAVVAKAILKKYPKLEPGFVYGDYQKYDIKRYISRSKDPKEVEKATEKYFFYSNLLNFFKEEVHYADGTIVKRENIEYSKDTGEIAWNKEKDFATIKKVLSLPQVNIVKKTEIQTHGLDRGKPRGLFNSNPSPKPSEDRKENLVPIKQGLDPRKYGGYAGISNSYAVLVKAIIEKGAKKQQKTVLEFQGISILDKINFEKNKENYLLEKGYIKILSTITLPKYSLFEFPDGTRRRLASILSTNNKRGEIHKGNELVIPEKYTTLLYHAKNINKTLEPEHLEYVEKHRNDFAKLLEYVLNFNDKYVGALKNGERIRQAFIDWETVDIEKLCFSFIGPRNSKNAGLFELTSQGSASDFEFLGVKIPRYRDYTPSSLLNATLIHQSITGLYETRIDLSKLGED

SEQ ID NO: 665 - protein, 1134 aa, Streptococcus mutans
MANGKILGLDIGIASVGVGIIDKETGKIIHVNSRIFPAATADSNVERRGFRQGRRLVRRKKHRKVRLADLFLDSNLLTDFSKVSLNLNPYQLRVKGLNEELSNEELFIALKSIVSRRGISYLDDASEDSGANSSEYGKAVEENRKLLEDRTPGQIQLERFEKYGKVRGDFTVVENGENHRLINVFSTSAYKKEAERILRRQQEFNMRIADEFIEAYLTILTGKRKYYHGPGNEKSRTDYGRFRTDGTTLDNIFGILIGKCTFYPDEYRAAKASYTAQEFNLLNDLNNLTVPTETKKLSEEQKRQIIEHAKTVKTLGAPTLLKYIVKLVGCSADDIKGYRIDKSDKPEIHTFEAYRKMRTMELIKVDDLSRESLDALAHILTLNTEREGIEEAIRDRFTNKEFNQEQINELVLFRKNNSSLFGKGWHNFSLKLMKELIPELYETSEEQMTILTRLGKQRVKKSSNRTNYIDEKELTEEIYNPVVAKSVRQAIKIINLATKKYGVFDNIVIEMARESNEDDEKKAIQNAQKANEDEKKAALLKAAHQFNGKEELPDSIFHGHKELLTKIRLWHQQGEKCLYTGKTIFINDLIHNPYKYEIDHILPLSLSFDDSLANKVLVLSTANQEKGQRTPFQSLDSMDGAWTYREFKSYVKGLKTLSNKKKDYLLTEENIDKIEVKQKFIERNLVDTRYSSRVVLNALQDFYKERKFDTKISVVRGQFTSQLRRKWRIEKTRETYHHHAVDALIIAASSQLNLWKKQNNPLISYKEDQFVDPETGEILSLSDDEYKKLVFKAPYEHFVDTLKSKKFEDSILFSYQVDSKYNRKISGATICGTRKAQLGKDTQEETYVLGKIKDIYSQKGYEDFIKKYKKDKTQFLMYHKDPQTFEKVIEEILKTYPDKELNEKGKEVSCNPFEKYRQENGPVRKYSKKGNGPEIKSLKYYDEVLGKNIDITPKNSLNKVVLRSLNPWRTDVYFNHETRKYEFLGLKYSDLRYLKGEHRYGILIGDYKKIKDKEGIEKESEFKFTLYKNDLILIKDTAKGKEELFRFWSRTGKDNAKTFEKNKIELKPYSKSQFEKGEDTNVLGKLYASSNQLQKSFGTLENLSIYKVRTDVLGNKYFIKKEGDKPQLNFKKKL

SEQ ID NO: 666 - protein, 1134 aa, Streptococcus mutans; identical to SEQ ID NO: 665

SEQ ID NO: 667 - protein, 1128 aa, Streptococcus mutans
MANSKILGLDIGIASVGVGIIDKETGKIIHVNSRIFPAATADSNVERRGFRQGRRLVRRKKHRKVRLADLFLDSNLLTDFSKVSLNLNPYQLRVKGLNEELSNEELFIALKSIVSRRGISYLDDASEDSGANSSEYGKAVEENRKLLEDRTPGQIQLERFEKYGKVRGDFTVVENGENHRLINVFSTSAYKKEAERILRRQQEFNIRIADEFIEAYLTILTGKRKYYHGPGNEKSRTDYGRFRTDGTTLDNIFGILIGKCTFYPDEYRAAKASYTAQEFNLLNDLNNLTVPTETKKLSEEQKRQIIEHAKTVKTLGAPTLLKYIAKLVGCSADDIKGYRIDKSDKPEIHTFEAYRKMRTMELIKVADLSRESLDALAHILTLNTEREGIEEAIRDRFTNKEFNQEQINELVLFRKNNSSLFGKGWHNFSLKLMKELIPELYETSEEQMTILTRLGKQRVKKSSNRTNYIDEKELTEEIYNPVVAKSVRQAIKIINLATKKYGVFDNIVIEMARESNEDDEKKAIQNAQKANEDEKEAALLKAAHQFNGKEELPDSIFHGHKELLTKIRLWHQQGEKCLYTGKTIFINDLIHNPYKYEIDHILPLSLSFDDSLANKVLVLSTANQEKGQRTPFQSLDSMDGAWTYREFKAYVKGLKTLSNKKKDYLLNEEDINKNEVKQKFIERNLVDTRYSSRVVLNTLQDFYKKREFDTKISVVRGQFTSQIRRKWRIEKTRETYHHHAVDALIIAASSQLNLWKKQNNPLISYKEDQFVDPETGEILSLSDDEYKELVFKAPYDHFVDTLKSKKFEDSILFSYQVDSKYNRKISDATIYGTRKARLGKDSQEETYVLGKIKDIYSQKGYEDFIKKYKKDKTQFLMYHKDPQTFEKVIEEILKTYSDKELNEKGKEVPCNPFEKYRQENGPVRKYSKKGNGPEIKSIKYYDNKLGNHIDITPNNSHHQVVLQSLKPWRTDVYFNPKSGKYELMGLKYSDLRFEKVSGDYGISVKKYNEIKSKEGVDENSEFKFTLYKNDLILIKDTESGEQELFRFLSRTMPNQKHYVELKPYDKSKFEGHQKLMDIFGEVAKGGQCLKGLNKSNISIYKVKTDVLGNKYFIKKEGDQPQLNFKKKI

SEQ ID NO: 668 - protein, 1128 aa, Streptococcus mutans; identical to SEQ ID NO: 667

SEQ ID NO: 669 - protein, 1338 aa, Streptococcus mutans
MDLIGTNSVGWAVVTDDYKVPAKKMKVLGNTDKSHIKKNLLGALLFDSGNTAADRRLKRTARRRYTRRRNRILYLQEIFAEEMSKVDDSFFHRLEDSFLVTEDKRGERHPIFGNLEEEVKYHENFPTIYHLRQYLADNPEKVDLRLVYLALAHIIKFRGHFLIEGKFDTRNNDVQRLFQEFLAVYDNTFENSSLQEQNVQVEEILTDKISKSAKKDRVLKLFPNEKSNGRFAEFLKLIVGNQADFKKHFELEEKAPLQFSKDTYEEELEVLLAQIGDNYAELFLSAKKLYDSILLSGILTVTDVSTKAPLSASMIQRYNEHQMDLAQLKQFIRQKLSDKYNEVFSDVSKDGYAGYIDGKTNQEAFYKYLKGLLNKIEGSGYFLDKIEREDFLRKQRTFDNGSIPHQIHLQEMRAIIRRQAEFYPFLADNQDRIEKILTFRIPYYVGPLARGKSDFAWLSRKSADKITPWNFDEIVDKESSAEAFINRMTNYDLYLPNQKVLPKHSLLYEKFTVYNELTKVKYKTEQGKTAFFDANMKQEIFDGVFKVYRKVTKDKLMDFLEKEFDEFRIVDLTGLDKENKAFNASYGTYHDLRKILDKDFLDNSKNEKILEDIVLTLTLFEDREMIRKRLENYSDLLTKEQVKKLERRHYTGWGRLSAELIHGIRNKESRKTILDYLIDDGNSNRNFMQLINDDALSFKEEIAKAQVIGETDNLNQVVSDIAGSPAIKKGILQSLKIVDELVKIMGHQPENIVVEMARENQFTNQGRRNSQQRLKGLTDSIKEFGSQILKEHPVEHSQLQNDRLFLYYLQNGRDMYTGEELDIDYLSQYDIDHIIPQAFIKDNSIDNRVLTSSKENRGKSDDVPSKNVVRKMKSYWSKLLSAKLITQRKFDNLTKAERGGLTDDDKAGFIKRQLVETRQITKHVARILDERFHTETDENNKKIRQVKIVTLKSNLVSNFRKEFELYKVREINDYHHAHDAYLNAVIGKALLGVYPQLEPEFVYGDYPHFHGHKENKATAKKFFYSNIMNFFKKDDVRTDKNGEIIWKKDEHISNIKKVLSYPQVNIVKKVEEQTGGFSKESILPKGNSDKLIPRKTKKFYWDTKKYGGFDSPIVAYSILVIADIEKGKSKKLKTVKALVGVTIMEKMTFERDPVAFLERKGYRNVQEENIIKLPKYSLFKLENGRKRLLASARELQKGNEIVLPNHLGTLLYHAKNIHKVDEPKHLDYVDKHKDEFKELLDVVSNFSKKYTLAEGNLEKIKELYAQNNGEDLKELASSFINLLTFTAIGAPATFKFFDKNIDRKRYTSTTEILNATLIHQSITGLYETRIDLSKLGGD

SEQ ID NO: 670 - protein, 1338 aa, Streptococcus mutans; identical to SEQ ID NO: 669

SEQ ID NO: 671 - protein, 1345 aa, Streptococcus mutans
MKKPYSIGLDIGTNSVGWAVVTDDYKVPAKKMKVLGNTDKSHIEKNLLGALLFDSGNTAEDRRLKRTARRRYTRRRNRILYLQEIFSEEMGKVDDSFFHRLEDFFLVTEDKRGERHPIFGNLEEEVKYHENFPTIYHLRQYLADNPEKVDLRLVYLALAHIIKFRGHFLIEGKFDTRNNDVQRLFQEFLAVYDNTFENSSLQEQNVQVEEILTDKISKSAKKDRVLKLFPNEKSNGRFAEFLKLIVGNQADFKKHFELEEKAPLQFSKDTYEEELEVLLAQIGDNYAELFLSAKKLYDSILLSGILTADDSSTKAPLSASMIQRYNEHQMDLAQLKQFIRQKLSDKYNEVFSDVSKDGYAGYIDGKTNQEAFYKYLKGLLNKIEGSGYFLDKIEREDFLRKQRTFDNGSIPHQIHLQEMRAIIRRQSEFYPFLADNQDRIEKILTFRIPYYVGPLARGKSDFAWLSRKSADKITPWNFDEIVDKESSAEAFINRMTNYDLYLPNQKVLPKHSLLYEKFTVYNELTKVKYKTEQGETAFFDANMKQEIFDGVFKVYRKVTKDKLMDFLEKEFDEFRIVDLTGLDKENKAFNASYGTYHDLRKILDKDFLDNSKNEKILEDIVLTLTLFEDREMIRKRLKNYSDLLTKEQLKKLERRHYTGWGRLSAELIHGIRNKESRKTILDYLIDDGNSNRNFMQLINDDALSFKEEIAKAQVIGETDNLNQVVSDIAGSPAIKKGILQSLKIVDELVKIMGHQPENIVVEMARENQFTNQGRRNSQQRLKGLTDSIKEFGSQILKEHPVENSQLQNDRLFLYYLQNGRDMYTGEELDIDYLSQYDIDHIIPQAFIKDNSIDNRVLTSSKENRGKSDDVPSKDVVRKMKPYWSKLLSAKLITQRKFDNLTKAERGGLTDDDKAGFIKRQLVETRQITKHVARILDERFNTETDENNKKIRQVKIVTLKSNLVSNFRKEFELYKVREINDYHHAHDAYLNAVIGKALLGVYPQLEPEFVYGDYPHFHGHEENKATAKKFFYSNIMNFFKKDDVRTDKNGEIIWKKDEHISNIKKVLSYPQVNIVKKVEEQTGGFSKESILPKGNSDKLIPRKTKKFYWDTKKYGGFDSPIVAYSILVIADIEKGKSKKLKTVKALVGVTIMEKMTFERDPVAFLERKGYRNVQEENIIKLPKYSLFKLENGRKRLLASARELQKGNEIVLPNHLGTLLYHAKNIHKVDEPKHLDYVDKHKDEFKELLDVVSNFSKKYTLAEGNLEKIKELYAQNNGEDLKELASSFINLLTFTAIGAPATFKFFDKNIDRKRYTSTTEILNATLIHQSITGLYETRIDLSKLGGD

SEQ ID NO: 672 - protein, 1345 aa, Streptococcus mutans; identical to SEQ ID NO: 671

SEQ ID NO: 673 - protein, 1229 aa, Streptococcus mutans
MKKPYSIGLDIGTNSVGWAVVTDDYKVPAKKMKVLGNTDKSHIEKNLLGALLFDSGNTAEDRRLKRTARRRYTRRRNRILYLQEIFSEEMGKVDDSFFHRLEDSFLVTEDKRGERHPIFGNLEEEVKYHENFPTIYHLRQYLADNPEKVDLRLVYLALAHIIKFRGHFLIEGKFDTRNNDVQRLFQEFLAVYDNTFENSSLQEQNIQVEEILTDKISKSAKKDRVLKLFPNEKSNGRFAEFLKLIVGNQADFKKHFELEEKAPLQFSKDTYEEELEVLLAQIGDNYAELFLSAKKLYDSILLSGILTVTDVGTKAPLSASMIQRYNEHQMDLTQLKQFIRQKLSDKYNEVFSDVSKDGYAGYIDGKTNQEAFYKYLKGLLNKIEGSGYFLDKIEREDFLRKQRTFDNGSIPHQIHLQEMRAIIRRQAEFYPFLADNQDRIEKILTFRIPYYVGPLARGKSDFAWLSRKSADKITPWNFDEIVDKESSAEAFINRMTNYDLYLPNQKVLPKHSLLYEKFTVYNELTKVKYKTEQGKTAFFDANMKQEIFDGVFKVYRKVTKDKLMDFLEKEFDEFRIVDLTGLDKENKVFNASYGTYHDLCKILDKDFLDNSKNEKILEDIVLTLTLFEDREMIRKRLENYSDLLTKEQVKKLERRHYTGWGRLSAELIHGIRNKESRKTILDYLIDDGNSNRNFMQLINDDALSFKEEIAKAQVIGETDNLNQVVSDIAGSPAIKKGILQSLKIVDELVKIMGHQPENIVVEMARENQFTNQGRRNSQQRLKGLTDSIKEFGSQILKEHPVENSQLQNDRLFLYYLQNGRDMYTGEELDIDYLSQYDIDHIIPQAFIKDNSIDNRVLTSSKENRGKSDDVPSKDVVRKMKPYWSKLLSAKLITQRKFDNLTKAERGGLTDDDKAGFIKRQLVETRQITKHVARILDERFNTETDENNKKIRQVKIVTLKSNLVSNFRKEFELYKVREINDYHHAHDAYLNAVIGKALLGVYPQLEPEFVYGDYPHFHGHEENKATAKKFFYSNIMNFFKKDDVRTDKNGEIIWKKDEHISNIKKVLSYPQVNIVKKVEEQTIGQNGGLFDDNPKSPLEVIPSKLVPLKKALNPEKYGGYQKPTTAYPILLIVDTKQLIPISVMDKKRFEQNPVKFLKDKGYQQIEKNNFVKLPKYTLVDIGNGIKRLWASSKEVHKGNQLVVSKKSQDLLYHAHHLDNDYSNEYVKNHY

SEQ ID NO: 674 - protein, 1229 aa, Streptococcus mutans; identical to SEQ ID NO: 673

SEQ ID NO: 675 - protein, 1345 aa, Streptococcus mutans
MKKPYSIGLDIGTNSVGWAVVTDDYKVPAKKMKVLGNTDKSHIEKNLLGALLFDSGNTAEDRRLKRTARRRYTRRRNRILYLQEIFSEEMGKVDDSFFHRLEDSFLVTEDKRGERHPIFGNLEEEVKYHENFPTIYHLRQYLADNPEKVDLRLVYLALAHIIKFRGHFLIEGKFDTRNNDVQRLFQEFLAVYDNTFENSSLQEQNVQVEEILTDKISKSAKKDRVLKLFPNEKSNGRFAEFLKLIVGNQADFKKHFELEEKAPLQFSKDTYEEELEVLLAQIGDNYAELFLSAKKLYDSILLSGILTVTDVGTKAPLSASMIQRYNEHQMDLAQLKQFIRQKLSDKYNEVFSDVSKDGYAGYIDGKTNQEAFYKYLKGLLNKIEGSGYFLDKIEREDFLRKQRTFDNGSIPHQIHLQEMRAIIRRQAEFYPFLADNQDRIEKLLTFRIPYYVGPLARGKSDFAWLSRKSADKITPWNFDEIVDKESSAEAFINRMTNYDLYLPNQKVLPKHSLLYEKFTVYNELIKVKYKTEQGKTAFFDANMKQEIFDGVFKVYRKVTKDKLMDFLEKEFDEFRIVDLTGLDKENKVFNASYGTYHDLCKILDKDFLDNSKNEKILEDIVLTLTLFEDREMIRKRLENYSDLLTKEQVKKLERRHYTGWGRLSAELIHGIRNKESRKTILDYLIDDGNSNRNFMQLINDDALSFKEEIAKAQVIGETDNLNQVVSDIAGSPAIKKGILQSLKIVDELVKIMGHQPENIVVEMARENQFTNQGRRNSQQRLKGLTDSIKEFGSQILKEHPVENSQLQNDRLFLYYLQNGRDMYTGEELDIDYLSQYDIDHIIPQAFIKDNSIDNRVLTSSKENRGKSDDVPSKDVVRKMKSYWSKLLSAKLITQRKFDNLTKAERGGLTDDDKAGFIKRQLVETRQITKHVARILDERFNTETDENNKKIRQVKIVTLKSNLVSNFRKEFELYKVREINDYHHAHDAYLNAVIGKALLGVYPQLEPEFVYGDYPHFHGHKENKATAKKFFYSNIMNFFKKDDVRTDKNGEIIWKKDEHISNIKKVLSYPQVNIVKKVEEQTGGFSKESILPKGNSDKLIPRKTKKFYWDTKKYGGFDSPIVAYSILVIADIEKGKSKKLKTVKALVGVTIMEKMTFERDPVAFLERKGYRNVQEENIIKLPKYSLFKLENGRKRLLASARELQKGNEIVLPNHLGTLLYHAKNIHKVDEPKHLDYVDKHKDEFKELLDVVSNFSKKYTLAEGNLEKIKELYAQNNGEDLKELASSFINLLTFTAIGAPATFKFFDKNIDRKRYTSTTEILNATLIHQSITGLYETRIDLNKLGGD

SEQ ID NO: 676 - protein, 1350 aa, Streptococcus mutans
MKKPYSIGLDIGTNSVGWAVVTDDYKVPAKKMKVLGNTDKSHIEKNLLGALLFDSGNTAEDRRLKRTARRRYTRRRNRILYLQEIFSEEMGKVDDSFFHRLEDSFLVTEDKRGERHPIFGNLEEEVKYHENFPTIYHLRQYLADNPEKVDLRLVYLALAHIIKFRGHFLIEGKFDTRNNDVQRLFQEFLAVYDNTFENSSLQEQNVQVEEILTDKISKSAKKDRVLKLFPNEKSNGRFAEFLKLIVGNQADFKKHFELEEKAPLQFSKDTYEEELEVLLAQIGDNYAELFLSAKKLYDSILLSGILTVTDVSTKAPLSASMIQRYNEHQMDLTQLKQFIRQKLSDKYNEVFSDVSKDGYAGYIDGKTNQEAFYKYLKGLLNKIEGSGYFLDKIEREDFLRKQRTFDNGSIPHQIHLQEMRAIIRRQAEFYSFLADNQDRIEKILTFRIPYYVGPLARGKSDFAWLSRKSADKITPWNFDEIVDKESSAEAFINRMTNYDLYLPNQKVLPKHSLLYEKFTVYNELTKVKYKTEQGKTAFFDANMKQEIFDGVFKVYRKVTKDKLMDFLEKEFDEFRIVDLTGLDKENKAFNASYGTYHDLRKILDKDFLDNSKNEKILEDIVLTLTLFEDREMIRKRLENYSDLLTKEQVKKLERRHYTGWGRLSAELIHGIRNKESRKTILDYLIDDGNSNRNFMQLINDDALSFKEEIAKAQVIGETDNLNQVVSDIAGSPAIKKGILQSLKIVDELVKIMGHQPENIVVEMARENQFTNQGRRNSQQRLKGLTDSIKEFGSQILKEHPVENSQLQNDRLFLYYLQNGRDMYTGEELDIDYLSQYDIDHIIPQAFIKDNSIDNRVLTSSKENRGKSDDVPSEDVVNRMRPFWNKLLSSGLISQRKYNNLTKKELTLDDKAGFIKRQLVETRQITKHVARMLDERFNKEFDDNNKRIRKVKIVTLKSNLVSSFRKEFELYKVREINDYHHAHDAYLNAVVVKALLVKYSKLEPEFVYGEYPKYNSYRERKTATQKMFFYSNIMNMFKSKVKLADDQIVERPMIEVNDETGEIAWDKTKHITTVKKVLSYPQVNIVKKVEEQTIGQNGGLFDDNPKSPLEVIPSKLVPLKKALNPEKYGGYQKPTTAYPILLIVDTKQLIPISVMDKKRFEQNPVKFLKDKGYQQIEKNNFVKLPKYTLVDIGNGIKRLWASSKEVHKGNQLVVSKKSQDLLYHAHHLDNDYSNEYVKNHYQQFDILFNEITSFSKKCKLGKEHIQKIEEAYSKERDSASIEELADGFIKLLGFTQLGATSPFSFLGIKLNQKQYTGKKDYLLPCMEATLIHQSITGLYETRIDLSKLGGD

SEQ ID NO: 677 - protein, 1350 aa, Streptococcus mutans
MKKPYSIGLDIGTNSVGWAVVTDDYKVPAKKMKVLGNTDKSHIEKNLLGALLFDSGNTAEDRRLKRTARRRYTRRRNRILYLQEIFSEEMGKVDDSFFHRLEDSFLVTEDKRGERHPIFGNLEEEVKYHENFPTIYHLRQYLADNPEKVDLRLVYLALAHIIKFRGHFLIEGKFDTRNNDVQRLFQEFLAVYDNTFENSSLQEQNVQVEEILTDKISKSAKKDRVLKLFPNEKSNGRFAEFLKLIVGNQADFKKHFELEEKAPLQFSKDTYEEELEVLLAQIGDNYAELFLSAKKLYDSILLSGILTVTDVSTKAPLSASMIQRYNEHQMDLTQLKQFIRQKLSDKYNEVFSDVSKDGYAGYIDGKTNQEAFYKYLKGLLNKIEGSGYFLDKIEREDFLRKQRTFDNGSIPHQIHLQEMRAIIRRQAEFYPFLADNQDRIEKILTFRIPYYVGPLARGKSDFAWLSRKSADKITPWNFDEIVDKESSAEAFINRMTNYDLYLPNQKVLPKHSLLYEKFTVYNELTKVKYKTEQGKTAFFDANMKQEIFDGVFKVYRKVTKDKLMDFLEKEFDEFRIVDLTGLDKENKAFNASYGTYHDLRKILDKDFLDNSKNEKILEDIVLTLTLFEDREMIRKRLKNYSDLLTKEQLKKLERRHYTGWGRLSAELIHGIRNKESRKTILDYLIDDGNSNRNFMQLINDDALSFKEEIAKAQVIGETDNLNQVVSDIAGSPAIKKGILQSLKIVDELVKIMGHQPENIVVEMARENQFTNQGRQNSQQRLKGLTDSIKEFGSQILKEHPVENSQLQNDRLFLYYLQNGRDMYTGEELDIDYLSQYDIDHIIPQAFIKDNSIDNRVLTSSKENRGKSDDVPSEDVVNRMRPFWNKLLSSGLISQRKYNNLTKKELTLDDKAGFIKRQLVETRQITKHVARMLDERFNKEFDDNNKRICKVKIVTLKSNLVSSFRKEFELYKVREINDYHHAHDAYLNAVVVKALLVKYSKLEPEFVYGEYPKYNSYRERKTATQKMFFYSNIMNMFKSKVKLADDQIVERPMIEVNDETGEIAWDKTKHITTVKKVLSYPQVNIVKKVEEQTIGQNGGLFDDNPKSPLEVIPSKLVPLKKALNPEKYGGYQKPTTAYPILLIVDTKQLIPISVMDKKRFEQNPVKFLKDKGYQQIEKNNFVKLPKYTLVDIGNGIKRLWASSKEVHKGNQLVVSKKSQDLLYHAHHLDNDYSNEYVKNHYQQFDILFNEITSFSKKCKLGKEHIQKIEEAYSKERDSASIEELADGFIKLLGFTQLGATSPFSFLGIKLNQKQYTGKKDYLLPCMEATLIHQSITGLYETRIDLSKLGGD

SEQ ID NO: 678 - protein, 1345 aa, Streptococcus mutans; identical to SEQ ID NO: 675

SEQ ID NO: 679 - protein, 1350 aa, Streptococcus mutans; identical to SEQ ID NO: 676

SEQ ID NO: 680 - protein, 1350 aa, Streptococcus mutans; identical to SEQ ID NO: 677

SEQ ID NO: 681 - protein, 1345 aa, Streptococcus mutans
MKKPYSIGLDIGTNSVGWAVVTDDYKVPAKKMKVLGNTDKSHIKKNLLGALLFDSGNTAADRRLKRTARRRYTRRRNRILYLQEIFAEEMSKVDDSFFHRLEDSFLVTEDKRGERHPIFGNLEEEVKYHENFPTIYHLRQYLADNPEKVDLRLVYLALAHIIKFRGHFLIEGKFDTRNNDVQRLFQEFLAVYDNTFENSSLQEQNVQVEEILTDKISKSAKKDRVLKLFPNEKSNGRFAEFLKLIVGNQADFKKHFELEEKAPLQFSKDTYEEELEVLLTQIGDNYAELFLSAKKLYDSILLSGILTVTDVSTKAPLSASMIQRYNEHQMDLAQLKQFIRQKLSDKYNEVFSDVSKDGYAGYIDGKTNQEAFYKYLKGLLNKIEGSGYFLDKIEREDFLRKQRTFDNGSIPHQIHLQEMRAIIRRQAEFYPFLADNQDRIEKILTFRIPYYVGPLARGKSDFAWLSRKSADKITPWNFDEIVDKESSAEAFINRMTNYDLYLPNQKVLPKHSLLYEKFTVYNELTKVKYKTEQGKTAFFDANMKQEIFDGVFKVYRKVTKDKLMDFLEKEFDEFRIVDLTGLDKENKAFNASYGTYHDLRKILDKDFLDNSKNEKILEDIVLTLTLFEDREMIRKRLENYSDLLTKEQVKKLERRHYTGWGRLSAELIHGIRNKESRKTLLDYLIDDGNSNRNFMQLINDDALSFKEEIAKAQVIGETDNLNQVVSDIAGSPAIKKGILQSLKIVDELVKIMGHQPENIVVEMARENQFTNQGRRNSQQRLKGLTDSIKEFGSQILKEHPVENSQLQNDRLFLYYLQNGRDMYTGEELDIDYLSQYDIDHIIPQAFIKDNSIDNRVLTSSKENRGKSDDVPSKDVVRKMKPYWSKLLSAKLITQRKFDNLTKAERGGLTDDDKAGFIKRQLVETRQITKHVARILDERFNTETDENNKKIRQVKIVTLKSNLVSNFRKEFELYKVREINDYHHAHDAYLNAVIGKALLGVYPQLEPEFVYGDYPHFHGHEENKATAKKFFYSNIMNFFKKDDVRTDKNGEIIWKKDEHISNIKKVLSYPQVNIVKKVEEQTGGFSKESILPKGNSDKLIPRKTKKFYWDTKKYGGFDSPIVAYSILVIADIEKGKSKKLKTVKALVGVTIMEKMTFERDPVAFLERKGYRNVQEENIIKLPKYSLFKLENGRKRLLASARELQKGNEIVLPNHLGTLLYHAKNIHKVDEPKHLDYVDKHKDEFKELLDVVSNFSKKYTLAEGNLEKIKELYAQNNGEDLKELSSSFINLLTFTAIGAPAAFKFFDKNIDRKRYTSTTEILNATLIHQSITGLYETRIDLSKLGGD

SEQ ID NO: 682 - protein, 1345 aa, Streptococcus mutans
MKKPYSIGLDIGTNSVGWAVVTDDYKVPAKKMKVLGNTDKSHIKKNLLGALLFDSGNTAADRRLKRTARRRYTRRRNRILYLQEIFAEEMSKVDDSFFHRLEDSFLVTEDKRGERHPIFGNLEEEVKYHENFPTIYHLRQYLADNPEKVDLRLVYLALAHIIKFRGHFLIEGKFDTRNNDVQRLFQEFLAVYDNTFENSSLQEQNVQVEEILTDKISKSAKKDRVLKLFPNEKSNGRFAEFLKLIVGNQADFKKHFELEEKAPLQFSKDTYEEELEVLLAQIGDNYAELFLSAKKLYDSILLSGILTVTDVSTKAPLSASMIQRYNEHQMDLAQLKQFIRQKLSDKYNEVFSDVSKDGYAGYIDGKTNQEAFYKYLKGLLNKIEGSGYFLDKIEREDFLRKQRTFDNGSIPHQIHLQEMRAIIRRQAEFYPFLADNQDRIEKILTFRIPYYVGPLARGKSDFAWLSRKSADKITPWNFDEIVDKESSAEAFINRMTNYDLYLPNQKVLPKHSLLYEKFTVYNELTKVKYKTEQGKTAFFDANMKQEIFDGVFKVYRKVTKDKLMDFLEKEFDEFRIVDLTGLDKENKAFNASYGTYHDLRKILDKDFLDNSKNEKILEDIVLTLTLFEDREMIRKRLENYSDLLTKEQVKKLERRHYTGWGRLSAELIHGIRNKESRKTILDYLIDDGNSNRNFMQLINDDALSFKEEIAKAQVIGETDNLNQVVSDIAGSPAIKKGILQSLKIVDELVKIMGHQPENIVVEMARENQFTNQGRRNSQQRLKGLTDSIKEFGSQILKEHPVEHSQLQNDRLFLYYLQNGRDMYTGEELDIDYLSQYDIDHIIPQAFIKDNSIDNRVLTSSKENRGKSDDVPSKNVVRKMKSYWSKLLSAKLITQRKFDNLTKAERGGLTDDDKAGFIKRQLVETRQITKHVARILDERFHTETDENNKKIRQVKIVTLKSNLVSNFRKEFELYKVREINDYHHAHDAYLNAVIGKALLGVYPQLEPEFVYGDYPHFHGHKENKATAKKFFYSNIMNFFKKDDVRTDKNGEIIWKKDEHISNIKKVLSYPQVNIVKKVEEQTGGFSKESILPKGNSDKLIPRKTKKFYWDTKKYGGFDSPIVAYSILVIADIEKGKSKKLKTVKALVGVTIMEKMTFERDPVAFLERKGYRNVQEENIIKLPKYSLFKLENGRKRLLASARELQKGNEIVLPNHLGTLLYHAKNIHKVDEPKHLDYVDKHKDEFKELLDVVSNFSKKYTLAEGNLEKIKELYAQNNGEDLKELASSFINLLTFTAIGAPATFKFFDKNIDRKRYTSTTEILNATLIHQSITGLYETRIDLSKLGGD

SEQ ID NO: 683 - protein, 1345 aa, Streptococcus mutans
MKKPYSIGLDIGTNSVGWAVVTDDYKVPAKKMKVLGNTDKSHIKKNLLGALLFDSGNTAADRRLKRTARRRYTRRRNRILYLQEIFAEEMSKVDDSFFHRLEDSFLVTEDKRGERHPIFGNLEEEVKYHENFPTIYHLRQYLADNPEKVDLRLVYLALAHIIKFRGHFLIEGKFDTRNNDVQRLFQEFLAVYDNTFENSSLQEQNVQVEEILTDKISKSAKKDRVLKLFPNEKSNGRFAEFLKLIVGNQADFKKHFELEEKAPLQFSKDTYEEELEVLLAQIGDNYAELFLSAKKLYDSILLSGILTVTDVSTKAPLSASMIQRYNEHQMDLAQLKQFIRQKLSDKYNEVFSDVSKDGYAGYIDGKTNQEAFYKYLKGLLNKIEGSGYFLDKIEREDFLRKQRTFDNGSIPHQIHLQEMRAIIRRQAEFYPFLADNQDRIEKILTFRIPYYVGPLARGKSDFAWLSRKSADKITPWNFDEIVDKESSAEAFINRMTNYDLYLPNQKVLPKHSLLYEKFTVYNELTKVKYKTEQGKTAFFDANMKQEIFDGVFKVYRKVTKDKLMDFLEKEFDEFRIVDLTGLDKENKVFNASYGTYHDLCKILDKDFLDNSKNEKILEDIVLTLTLFEDREMIRKRLENYSDLLTKEQVKKLERRHYTGWGRLSAELIHGIRNKESRKTILDYLIDDGNSNRNFMQLINDDALSFKEEIAKAQVIGETDNLNQVVSDIAGSPAIKKGILQSLKIVDELVKIMGHQPENIVVEMARENQFTKQGRRNSQQRLKGLTDSIKEFGSQILKEHPVENSQLQNDRLFLYYLQNGRDMYTGEELDIDYLSQYDIDHIIPQAFIKDNSIDNRVLTSSKENRGKSDDVPSKDVVRKMKSYWSKLLSAKLITQRKFDNLTKAERGGLTDDDKAGFIKRQLVETRQITKHVARILDERFYTETDENNKKIRQVKIVTLKSNLVSNFRKEFELYKVREINDYHHAHDAYLNAVIGKALLGVYPQLEPEFVYGDYPHFHGHKENKATAKKFFYSNIMNFFKKDDVRTDKNGEIIWKKDEHISNIKKVLSYPQVNIVKKVEEQTGGFSKESILPKGNSDKLIPRKTKKFYWDTKKYGGFDSPIVAYSILVIADIEKGKSKKLKTVKALVGVTIMEKMTFERDPVAFLERKGYRNVQEENIIKLPKYSLFKLENGRKRLLASARELQKGNEIVLPNHLGTLLYHAKNIHKVDEPKHLDYVDKHKDEFKELLDVVSNFSKKYTLAEGNLEKIKELYAQNNGEDLKELASSFINLLTFTAIGAPATFKFFDKNIDRKRYTSTTEILNATLIHQSITGLYETRIDLSKLGGD

SEQ ID NO: 684 - protein, 1345 aa, Streptococcus mutans
MKKPYSIGLDIGTNSVGWAVVTDDYKVPAKKMKVLGNTDKSHIKKNLLGALLFDSGNTAADRRLKRTARRRYTRRRNRILYLQEIFAEEMSKVDDSFFHRLEDSFLVTEDKRGERHPIFGNLEEEVKYHENFPTIYHLRQYLADNPEKVDLRLVYLALAHIIKFRGHFLIEGKFDTRNNDVQRLFQEFLAVYDNTFENSSLQEQNVQVEEILTDKISKSAKKDRVLKLFPNEKSNGRFAEFLKLIVGNQADFKKHFELEEKAPLQFSKDTYEEELEVLLAQIGDNYAELFLSAKKLYDSILLSGILTVTDVSTKAPLSASMIQRYNEHQMDLAQLKQFIRQKLSDKYNEVFSDVSKDGYAGYIDGKTNQEAFYKYLKGLLNKIEGSGYFLDKIEREDFLRKQRTFDNGSIPHQIHLQEMRAIIRRQAEFYPFLADNQDRIEKILTFRIPYYVGPLARGKSDFAWLSRKSADKITPWNFDEIVDKESSAEAFINRMTNYDLYLPNQKVLPKHSLLYEKFTVYNELTKVKYKTEQGKTAFFDANMKQEIFDGVFKVYRKVTKDKLMDFLEKEFDEFRIVDLTGLDKENKAFNASYGTYHDLRKILDKDFLDNSKNEKILEDIVLTLTLFEDREMIRKRLENYSDLLTKEQVKKLERRHYTGWGRLSAELIHGIRNKESRKTILDYLIDDGNSNRNFMQLINDDALSFKEEIAKAQVIGETDNLNQVVSDIAGSPAIKKGILQSLKIVDELVKIMGHQPENIVVEMARENQFTNQGRRNSQQRLKGLTDSIKEFGSQILKEHPVENSQLQNDRLFLYYLQNGRDMYTGEELDIDYLSQYDIDHIIPQAFIKDNSIDNRVLTSSKENRGKSDDVPSKNVVRKMKSYWSKLLSAKLITQRKFDNLTKAERGGLTDDDKAGFIKRQLVETRQITKHVARILDERFHTETDENNKKIRQVKIVTLKSNLVSNFRKEFELYKVREINDYHHAHDAYLNAVIGKALLGVYPQLEPEFVYGDYPHFHGHKENKATAKKFFYSNIMNFFKKDDVRTDKNGEIIWKKDEHISNIKKVLSYPQVNIVKKVEEQTGGFSKESILPKGNSDKLIPRKTKKFYWDTKKYGGFDSPIVAYSILVIADIEKGKSKKLKTVKALVGVTIMEKMTFERDPVAFLERKGYRNVQEENIIKLPKYSLFKLENGRKRLLASARELQKGNEIVLPNHLGTLLYHAKNIHKVDEPKHLDYVDKHKDEFKELLDVVSNFSKKYTLAEGNLEKIKELYAQNNGEDLKELSSSFINLLTFTAIGAPAAFKFFDKNIDRKRYTSTTEILNATLIHQSITGLYETRIDLSKLGGD

SEQ ID NO: 685 - protein, 1345 aa, Streptococcus mutans; identical to SEQ ID NO: 681

SEQ ID NO: 686 - protein, 1345 aa, Streptococcus mutans; identical to SEQ ID NO: 682

SEQ ID NO: 687 - protein, 1345 aa, Streptococcus mutans; identical to SEQ ID NO: 683

SEQ ID NO: 688 - protein, 1345 aa, Streptococcus mutans; identical to SEQ ID NO: 684

SEQ ID NO: 689 - protein, 1345 aa, Streptococcus mutans; identical to SEQ ID NO: 682

SEQ ID NO: 690 - protein, 1345 aa, Streptococcus mutans; identical to SEQ ID NO: 682

SEQ ID NO: 691 - protein, 1345 aa, Streptococcus mutans; identical to SEQ ID NO: 682

SEQ ID NO: 692 - protein, 1345 aa, Streptococcus mutans; identical to SEQ ID NO: 682

SEQ ID NO: 693 - protein, 1359 aa, Streptococcus mutans
MKKPYSIGLDIGTNSVGWAVVTDDYKVPAKKMKVLGNTDKSHIKKNLLGALLFDSGNTAEDRRLKRTARRRYTRRRNRILYLQEIFAEEMMQVDESFFQRLDDSFLVEEDKRGSRYPIFGTLKEEKKYHKEFKTIYHLREKLANSTEKADLRLVYLSLAHMIKFRGHFLIEGQLKAENTNVQALFKDFVEVYDKTVEESHLSEMTVDALSILTEKVSKSRRLENLVECYPTEKKNTLFGNLIALSLGLQPNFKTNFQLSEDAKLQFSKDTYEEDLEGLLGEIGDEYADLFASAKNLYDAILLSGILAVDDNTTKAPLSASMVKRYKEHKEELAAFKRFIKEKLPKKYEEIFKDDTKNGYAGYVGADKKLRKRSGKLATEEEFYKYVKGILNKVEGADVWLDKIDREDFLRKQRTFDNGSIPHQIHLQEMHAILRRQGEHYPFLKENQDKIEKILTFRIPYYVGPLVRKGSRFAWAEYKADEKITPWNFDDILDKEKSAEKFITRMTLNDLYLPEEKVLPKHSLLYETFTVYNELTKVKYVNEQGEAKFFDANMKQEIFDHVFKENRKVTKDKLLNYLNKEFEEFRIVNLTGLDKENKVFNSSLGTYHDLRKILNKSFLDNKENEQIIEDIIQTLTLFEDREMIRQRLQKYSDIFTKAQLKKLERRHYTGWGRLSYKLINGIRDKQSNKTILGYLIDDGYSNRNFMQLINDDALSFKEEIAKAQVIGEMDGLNQVVSDIAGSPAIKKGILQSLKIVDELVKVMGHNPANIVIEMARENQTTAKGRRSSQKRYKRLEEAIKNLDHDLNHKILKEHPTDNQALQNDRLFLYYLQNGRDMYTEDPLDINRLSDYDIDHIIPQAFIKDNSIDNRVLTRSDKNRGKSDDVPSEEVVHKMKPFWSKLLSAKLITQRKFDNLTKAERGGLTDDDKAGFIKRQLVETRQITKHVARILDERFNTETDENNKKIRQVKIVTLKSNLVSNFRKEFELYKVREINDYHHAHDAYLNAVIGKALLGVYPQLEPEFVYGDYPHFHGHKENKATAKKFFYSNIMNFFKKGDVRTDKNGEIIWKKDEHISNIKKVLSYPQVNIVKKVEEQTGGFSKESILPKGNSDKLIPRKTKKFYWDTKKYGGFDSPIVAYSILVIADIEKGKSKKLKTVKALVGVTIMEKMTFERDPVAFLERKGYRNVQEENIIKLPKYSLFKLENGRKRLLASARELQKGNEIVLPNHLETLLYHAKNIHKVDEPKHLDYVDKHKDEFKELLDVVSNFSKKYTLAEGNLEKIKELYAQNNGEDLKELASSFINLLTFTAIGAPAAFKFFDKNIDRKRYTSTTEILNATLIHQSITGLYETRIDLNKLGGD

SEQ ID NO: 694 - protein, 1359 aa, Streptococcus mutans; identical to SEQ ID NO: 693

SEQ ID NO: 695 - protein, 1355 aa, Streptococcus mutans
MKKPYSIGLDIGTNSVGWAVVTDDYKVPAKKMKVLGNTDKSHIKKNLLGALLFDSGNTAEDRRLKRTARRRYTRRRNRILYLQEIFAEEMSKVDDSFFHRLDESFLTDDDKNFDSHPIFGNKAEEDAYHQKFPTIYHLRKHLADSTEKADLRLVYLALAHMIKFRGHFLIEGELNAENTDVQKLFADFVGVYDRTFDDSHLSEITVDASSILTEKISKSRRLEKLINNYPKEKKNTLFGNLIALSLGLQPNFKTNFKLSEDAKLQFSKDTYEEDLEELLGKIGDDYADLFTLAKNLYDAILLSGILTADDSSTKAPLSASMIKRYAEHHEDLEKLKEFIKANKPELYHDIFKDETKNGYAGYIENGVKQDEFYKYLKNTLSKITGSDYFLDQIEREDFLRKQRTFDNGSIPHQIHLQEMHAILRRQGDYYPFLKENQDRIEKILTFRIPYYVGPLARKNSRFAWAEYHSDEAVTPWNFDQVIDKESSAQAFIEHMTNNDLYLPNEKVLPKHSPLYEKYTVYNELTKIKYVTEIGEAKFFDANLKQEIFDGLFKHERKVTKKKLRTFLDKNFDEFRIVDIQGLDKETETFNASYATYQDLLKVIKDKVFMDNPENAEILENIVLTLTLFEDREMIKQRLAKYADVFDKKVIDQLARRHYTGWGRLSAKLLNGIRDKQSCKTIMDYLIDDAQSNRNLMQLITDDNLTFKDDIVKAQYVDNSDDLHQVVQSLAGSPAIKKGILQSLKIVDELVKVMGKEPEQIVVEMARENQTTAKGRRNSQQRYKRLKEAIKSLDRDLNHKILKEHPTDNQALQNNRLFLYYLQNGRDMYTGESLDINRLSDYDIDHVIPQAFIKDNSIDNRVLTSSKANRGKSDDVPSEDVVNRMRPFWNKLLSSGLISQRKYNNLTKKELTLDDKAGFIKRQLVETRQITKHVARMLDERFNKEFDDNNKRIRRVKIVTLKSNLVSSFRKEFELYKVREINDYHHAHDAYLNAVVVKALLVKYPKLEPEFVYGEYPKYNSYRERKTATQKMFFYSNIMNMFKSKVKLADDQIVERPMIEVNDETGEIAWDKTKHITTVKKVLSYPQVNIVKKVEEQTIGQNGGLFDDNPKSPLEVIPSKLVPLKKALNPEKYGGYQKPTTAYPILLIVDTKQLIPISVMDKKRFEQNPVKFLKDKGYQQIEKNNFVKLPKYTLVDIGNGIKRLWASSKEVHKGNQLVVSKKSQDLLYHAHHLDNDYSNEYVKNHYQQFDILFNEITSFSKKCKLGKEHIQKIEEAYSKERDFASIEELADGFIKLLGFTQLGATSPFSFLGIKLNQKQYTGKKDYLLPCMEATLIHQSITGLYETRIDLSKLGGD

SEQ ID NO: 696 - protein, 1355 aa, Streptococcus mutans; identical to SEQ ID NO: 695

SEQ ID NO: 697 - protein, 1345 aa, Streptococcus mutans
MKKPYSIGLDIGTNSVGWAVVTDDYKVPAKKMKVLGNTDKSHIKKNLLGALLFDSGNTAEDRRLKRTARRRYTRRRNRILYLQEIFSEEMDKVDDSFFHRLEDSFLVTEDKRGERHPIFGNLEEEVKYHENFPTIYHLRQYLADNPEKVDLRLVYLALAHIIKFRGHFLIEGKFDTRNNDVQRLFQEFLAVYDNTFENSSLQEQNVQVEEILTDKISKSAKKDRVLKLFPNEKSNGRFAEFLKLIVGNQADFKKHFELEEKAPLQFSKDTYEEELEVLLAQIGDNYAELFLSAKKLYDSILLSGILTVTDVSTKAPLSASMIQRYNEHQMDLAQLKQFIRQKLSDKYNEVFSDVSKDGYAGYIDGKTNQEAFYKYLKGLLNKIEGSGYFLDKIEREDFLRKQRTFDNGSIPHQIHLQEMRAIIRRQAEFYPFLADNQDRIEKILTFRIPYYVGPLARGKSDFAWLSRKSADKITPWNFDEIVDKESSAEAFINRMTNYDLYLPNQKVLPKHSLLYEKFTVYNELTKVKYKTEQGKTAFFDANMKQEIFDGVFKVYRKVTKDKLMDFLEKEFDEFRIVDLTGLDKENKVFNASYGTYHDLCKILDKDFLDNSKNEKILEDIVLTLTLFEDREMIRKRLENYSDLLTKEQVKKLERRHYTGWGRLSAELIHGIRNKESRKTILDYLIDDGNSNRNFMQLINDDALSFKEEIAKAQVIGETDNLNQVVSDIAGSPAIKKGILQSLKIVDELVKIMGHQPENIVVEMARENQFTKQGRRNSQQRLKGLTDSIKEFGSQILKEHPVENSQLQNDRLFLYYLQNGRDMYTGEELDIDYLSQYDIDHIIPQAFIKDNSIDNRVLTSSKENRGKSDDVPSKDVVRKMKSYWSKLLSAKLITQRKFDNLTKAERGGLTDDDKAGFIKRQLVETRQITKHVARILDERFYTETDENNKKIRQVKIVTLKSNLVSNFRKEFELYKVREINDYHHAHDAYLNAVIGKALLGVYPQLEPEFVYGDYPHFHGHKENKATAKKFFYSNIMNFFKKDDVRTDKNGEIIWKKDEHISNIKKVLSYPQVNIVKKVEEQTGGFSKESILPKGNSDKLIPRKTKKFYWDTKKYGGFDSPIVAYSILVIADIEKGKSKKLKTVKALVGVTIMEKMTFERDPVAFLERKGYRNVQEENIIKLPKYSLFKLENGRKRLLASARELQKGNEIVLPNHLGTLLYHAKNIHKVDEPKHLDYVDKHKDEFKELLDVVSNFSKKYTLAEGNLEKIKELYAQNNGEDLKELASSFINLLTFTAIGAPATFKFFDKNIDRKRYTSTTEILNATLIHQSITGLYETRIDLSKLGGD

SEQ ID NO: 698 - protein, 1345 aa, Streptococcus mutans; identical to SEQ ID NO: 697

SEQ ID NO: 699 - protein, 1345 aa, Streptococcus mutans
MKKPYSIGLDIGTNSVGWAVVTDDYKVPAKKMKVLGNTDKSHIKKNLLGALLFDSGNTAEDRRLKRTARRRYTRRRNRILYLQEIFSEEMGKVDDSFFHRLDESFLTDDDKNFDSHPIFGNKAEEDAYHQKFPTIYHLRKHLADSTEKADLRLVYLALAHMIKFRGHFLIEGELNAENTDVQKLFADFVGVYDRTFDDSHLSEITVDASSILTEKISKSRRLEKLINNYPKEKKNTLFGNLIALSLGLQPNFKTNFKLSEDAKLQFSKDTYEEELEVLLAQIGDNYAELFLSAKKLYDSILLSGILTVTDVSTKAPLSASMIQRYNEHQMDLAQLKQFIRQKLSDKYNEVFSDVSKDGYAGYIDGKTNQEAFYKYLKGLLNKIEGSGYFLDKIEREDFLRKQRTFDNGSIPHQIHLQEMRAIIRRQAEFYPFLADNQDRIEKILTFRIPYYVGPLARGKSDFAWLSRKSADKITPWNFDEIVDKESSVEAFINRMTNYDLYLPNQKVLPKHSLLYEKFTVYNELTKVKYKTEQGKTAFFDANMKQEIFDGVFKVYRKVTKDKLMDFLEKEFDEFRIVDLTGLDKENKAFNASYGTYHDLRKILDKDFLDNSKNEKILEDIVLTLTLFEDREMIRKRLKNYSDLLTKEQLKKLERRHYTGWGRLSAELIHGIRNKESRKTILDYLIDDGNSNRNFMQLINDDALSFKEEIAKAQVIGETDNLNQVVSDIAGSPAIKKGILQSLKIVDELVKIMGHQPENIVVEMARENQFTNQGRRNSQQRLKGLTDSIKEFGSQILKEHPVENSQLQNDRLFLYYLQNGRDMYTGEELDIDYLSQYDIDHIIPQAFIKDNSIDNRVLTSSKENRGKSDDVPSKDVVRKMKSYWSKLLSAKLITQRKFDNLTKGERGGLTDDDKAGFIKRQLVETRQITKHVARILDERFNTETDENNKKIRQVKIVTLKSNLVSNFRKEFELYKVREINDYHHAHDAYLNAVIGKALLGVYPQLEPEFVYGDYPHFHGHKENKATAKKFFYSNIMNFFKKDDVRTDKNGEIIWKKDEYISNIKKVLSYPQVNIVKKVEEQTGGFSKESILPKGDSDKLIPRKTKKFYWDTKKYGGFDSPIVAYSILVIADIEKGKSKKLKTVKALVGVTIMEKMTFERDPVAFLERKGYRNVQEENIIKLPKYSLFKLENGRKRLLASARELQKGNEIVLPNHLGTLLYHAKNIHKVDEPKHLDYVDKHKDEFKELLDVVSNFSKKYTLAEGNLEKIKELYAQNNGEDLKELASSFINLLTFTAIGAPATFKFFDKNIDRKRYTSTTEILNATLIHQSITGLYETRIDLSKLGGD

SEQ ID NO: 700 - protein, 1345 aa, Streptococcus mutans
MKKPYSIGLDIGTNSVGWAVVTDDYKVPAKKMKVLGNTDKSHIKKNLLGALLFDSGNTAEDRRLKRTARRRYTRRRNRILYLQEIFSEEMGKVDDSFFHRLDESFLTDDDKNFDSYPIFGNKAEEDAYHQKFPTIYHLRKHLADSTEKADLRLVYLALAHMIKFRGHFLIEGELNAENTDVQKLFADFVGVYDRTFDDSHLSEITVDASSILTEKISKSRRLEKLINNYPKEKKNTLFRNLVALSLGLQPNFKTNFKLSEDAKLQFSKDTYEEDLEELLGKIGDDYADLFTLAKNLYDAILLSGILTADDSSTKAPLSASMIKRYAEHHEDLEKLKEFIKANKPELYHDIFKDETKNGYAGYIENGVKQDEFYKYLKNTLSKIAGSDYFLDKIEREDFLRKQRTFDNGSIPHQIHLQEMHAILRRQGDYYPFLKENQDRIEKILTFRIPYYVGPLARGKSDFAWLSRKSADKITPWNFDEIVDKESSVEAFINRMTNYDLYLPNQKVLPKHSLLYEKFTVYNELTKVKYKTEQGKTAFFDANMKQEIFDGVFKVYRKVTKDKLMDFLEKEFDEFRIVDLTGLDKENKAFNASYGTYHDLRKILDKDFLDNSKNEKILEDIVLTLTLFEDREMIRKRLKNYSDLLTKEQLKKLERRHYTGWGRLSAELIHGIRNKESRKTILDYLIDDGNSNRNFMQLINDDALSFKEEIAKAQVIGETDNLNQVVSDIAGSPAIKKGILQSLKIVDELVKIMGHQPENIVVEMARENQFTNQGRRNSQQRLKGLTDSIKEFGSQILKEHPVENSQLQNDRLFLYYLQNGRDMYTGEELDIDYLSQYDIDHIIPQAFIKDNSIDNRVLTSSKENRGKSDDVPSKDVVRKMKSYWSKLLSAKLITQRKFDNLTKGERGGLTDDDKAGFIKRQLVETRQITKHVARILDERFNTETDENNKKIRQVKIVTLKSNLVSNFRKEFELYKVREINDYHHAHDAYLNAVIGKALLGVYPQLEPEFVYGDYPHFHGHKENKATAKKFFYSNIMNFFKKDDVRTDKNGEIIWKKDEYISNIKKVLSYPQVNIVKKVEEQTGGFSKESILPKGDSDKLIPRKTKKFYWDTKKYGGFDSPIVAYSILVIADIEKGKSKKLKTVKALVGVTIMEKMTFERDPVAFLERKGYRNVQEENIIKLPKYSLFKLENGRKRLLASARELQKGNEIVLPNHLGTLLYHAKNIHKVDEPKHLDYVDKHKDEFKELLDVVSNFSKKYTLAEGNLEKIKELYAQNNGEDLKELASSFINLLTFTAIGAPATFKFFDKNIDRKRYTSTTEILNATLIHQSITGLYETRIDLSKLGGD

SEQ ID NO: 701 - protein, 1345 aa, Streptococcus mutans; identical to SEQ ID NO: 700

SEQ ID NO: 702 - protein, 1345 aa, Streptococcus mutans
MKKPYSIGLDIGTNSVGWAVVTDDYKVPAKKMKVLGNTDKSHIKKNLLGALLFDSGNTAEDRRLKRTARRRYTRRRNRILYLQEIFSEEMGKVDDSFFHRLEDSFLVTEDKRGERHPIFGNLEEEVKYHENFPTIYHLRQYLADNPEKTDLRLVYLALAHIIKFGGHFLIEGKFDTRNNDVQRLFQEFLAVYDNTFENSSLQEQNVQVEEILTDKISKSAKKDRVLKLFPNEKSNGRFAEFLKLIVGNQADFKKHFELEEKAPLQFSKDIYEEELEVLLAQIGDNYAELFLSAKKLYDSILLSGILTVTDVSTKAPLSASMIQRYNEHQMDLAQLKQFIRQKLSDKYNEVFSDVSKDGYAGYIDGKTNQEAFYKYLKGLLNKIEGSGYFLDKIEREDFLRKQRTFDNGSIPHQIHLQEMRAIIRRQAEFYPFLADNQDRIEKILTFRIPYYVGPLARGKSDFAWLSRKSADKITPWNFDEIVDKESSVEAFINRMTNYDLYLPNQKVLPKHSLLYEKFTVYNELTKVKYKTEQGKTAFFDANMKQEIFDGVFKVYRKVTKDKLMDFLEKEFDEFRIVDLTGLDKENKAFNASYGTYHDLRKILDKDFLDNSKNEKILEDIVLTLTLFEDREMIRKRLKNYSDLLTKEQLKKLERRHYTGWGRLSAELIHGIRNKESRKTILDYLIDDGNSNRNFMQLINDDALSFKEEIAKAQVIGETDNLNQVVSDIAGSPAIKKGILQSLKIVDELVKIMGHQPENIVVEMARENQFTNQGRRNSQQRLKGLTDSIKEFGSQILKEHPVENSQLQNDRLFLYYLQNGRDMYTGEELDIDYLSQYDIDHIIPQAFIKDNSIDNRVLTSSKENRGKSDDVPSKNVVRKMKSYWSKLLSAKLITQRKFDNLTKAERGGLTDDDKAGFIKRQLVETRQITKHVARILDERFHTETDENNKKIRQVKIVTLKSNLVSNFRKEFELYKVREINDYHHAHDAYLNAVIGKALLGVYPQLEPEFVYGDYPHFHGHKENKATAKKFFYSNIMNFFKKDDVRTDKNGEIIWKKDEHISNIKKVLSYPQVNIVKKVEEQTGGFSKESILPKGNSDKLIPRKTKKFYWDTKKYGGFDSPIVAYSILVIADIEKGKSKKLKTVKALVGVTIMEKMTFERDPVAFLERKGYRNVQEENIIKLPKYSLFKLENGRKRLLASARELQKGNEIVLPNHLGTLLYHAKNIHKVDEPKHLDYVDKHKDEFKELLDVVSNFSKKYTLAEGNLEKIKELYAQNNGEDLKELASSFINLLTFTAIGAPATFKFFDKNIDRKRYTSTTEILNATLIHQSITGLYETRIDLSKLGGD

SEQ ID NO: 703 - protein, 1345 aa, Streptococcus mutans; identical to SEQ ID NO: 702

SEQ ID NO: 704 - protein, 1345 aa, Streptococcus mutans
MKKPYSIGLDIGTNSVGWAVVTDDYKVPAKKMKVLGNTDKSHIKKNLLGALLFDSGNTAEDRRLKRTARRRYTRRRNRILYLQEIFSEEMGKVDDSFFHRLEDSFLVTEDKRGERHPIFGNLEEEVKYHENFPTIYHLRQYLADNPEKTDLRLVYLALAHIIKFRGHFLIEGKFDTRNNDVQRLFQEFLAVYDNTFENSSLQEQNVQVEEILTDKISKSAKKDRVLKLFPNEKSNGRFAEFLKLIVGNQADFKKHFELEEKAPLQFSKDIYEEELEVLLAQIGDNYAELFLSAKKLYDSILLSGILTVTDVSTKAPLSASMIQRYNEHQMDLAQLKQFIRQKLSDKYNEVFSDVSKDGYAGYIDGKTNQEAFYKYLKGLLNKIEGSGYFLDKIEREDFLRKQRTFDNGSIPHQIHLQEMRAIIRRQAEFYPFLADNQDRIEKILTFRIPYYVGPLARGKSDFAWLSRKSADKITPWNFDEIVDKESSVEAFINRMTNYDLYLPNQKVLPKHSLLYEKFTVYNELTKVKYKTEQGKTAFFDANMKQEIFDGVFKVYRKVTKDKLMDFLEKEFDEFRIVDLTGLDKENKAFNASYGTYHDLRKILDKDFLDNSKNEKILEDIVLTLTLFEDREMIRKRLKNYSDLLTKEQLKKLERRHYTGWGRLSAELIHGIRNKESRKTILDYLIDDGNSNRNFMQLINDDALSFKEEIAKAQVIGETDNLNQVVSDIAGSPAIKKGILQSLKIVDELVKIMGHQPENIVVEMARENQFTNQGRRNSQQRLKGLTDSIKEFGSQILKEHPVENSQLQNDRLFLYYLQNGRDMYTGEELDIDYLSQYDIDHIIPQAFIKDNSIDNRVLTSSKENRGKSDDVPSKNVVRKMKSYWSKLLSAKLITQRKFDNLTKAERGGLTDDDKAGFIKRQLVETRQITKHVARILDERFHTETDENNKKIRQVKIVTLKSNLVSNFRKEFELYKVREINDYHHAHDAYLNAVIGKALLGVYPQLEPEFVYGDYPHFHGHKENKATAKKFFYSNIMNFFKKDDVRTDKNGEIIWKKDEHISNIKKVLSYPQVNIVKKVEEQTGGFSKESILPKGNSDKLIPRKTKKFYWDTKKYGGFDSPIVAYSILVIADIEKGKSKKLKTVKALVGVTIMEKMTFERDPVAFLERKGYRNVQEENIIKLPKYSLFKLENGRKRLLASARELQKGNEIVLPNHLGTLLYHAKNIHKVDEPKHLDYVDKHKDEFKELLDVVSNFSKKYTLAEGNLEKIKELYAQNNGEDLKELASSFINLLTFTAIGAPATFKFFDKNIDRKRYTSTTEILNATLIHQSITGLYETRIDLSKLGGD

SEQ ID NO: 705 - protein, 1345 aa, Streptococcus mutans
MKKPYSIGLDIGTNSVGWAVVTDDYKVPAKKMKVLGNTDKSHIKKNLLGALLFDSGNTAEDRRLKRTARRRYTRRRNRILYLQEIFSEEMGKVDDSFFHRLEDSFLVTEDKRGERHPIFGNLEEEVKYHENFPTIYHLRQYLADNPEKTDLRLVYLALAHIIKFRGHFLIEGKFDTRNNDVQRLFQEFLAVYDNTFENSSLQEQNVQVEEILTDKISKSAKKDRVLKLFPNEKSNGRFAEFLKLIVGNQADFKKHFELEEKAPLQFSKDIYEEELEVLLAQIGDNYAELFLSAKKLYDSILLSGILTVTDVSTKAPLSASMIQRYNEHQMDLAQLKQFIRQKLSDKYNEVFSDVSKDGYAGYIDGKTNQEAFYKYLKGLLNKIEGSGYFLDKIEREDFLRKQRTFDNGSIPHQIHLQEMRAIIRRQAEFYPFLADNQDRIEKILTFRIPYYVGPLARGKSDFAWLSRKSADKITPWNFDEIVDKESSVEAFINRMTNYDLYLPNQKVLPKHSLLYEKFTVYNELTKVKYKTEQGKTAFFDANMKQEIFDGVFKVYRKVTKDKLMDFLEKEFDEFRIVDLTGLDKENKAFNASYGTYHDLRKILDKDFLDNSKNEKILEDIVLTLTLFEDREMIRKRLKNYSDLLTKEQLKKLERRHYTGWGRLSAELIHGIRNKESRKTILDYLIDDGNSNRNFMQLINDDALSFKEEIAKAQVIGETDNLNQVVSDIAGSPAIKKGILQSLKIVDELVKIMGHQPENIVVEMARENQFTNQGRRNSQQRLKGLTDSIKEFGSQILKEHPVENSQLQNDRLFLYYLQNGRDMYTGEELDIDYLSQYDIDHIIPQAFIKDNSIDNRVLTSSKENRGKSDDVPSKDVVRKMKSYWSKLLSAKLITQRKFDNLTKAERGGLTDDDKAGFIKRQLVETRQITKHVARILDERFNTETDENNKKIRQVKIVTLKSNLVSNFRKEFELYKVREINDYHHAHDAYLNAVIGKALLGVYPQLEPEFVYGDYPHFHGHKENKATAKKFFYSNIMNFFKKDDVRTDKNGEIIWKKDEHISNIKKVLSYPQVNIVKKVEEQTGGFSKESILPKGNSYKLIPRKTKKFYWDTKKYGGFDSPIVAYSILVIADIEKGKSKKLKTVKALVGVTIMEKMTFERDPVAFLERKGYRNVQEENIIKLPKYSLFKLENGRKRLLASARELQKGNEIVLPNHLGTLLYHAKNIHKVDEPKHLDYVDKHKDEFKELLDVVSNFSKKYTLAEGNLEKIKELYAQNNGEDLKELASSFINLLTFTAIGAPAAFKFFDKNIDRKRYTSTTEILNATLIHQSITGLYETRIDLSKLGGD

SEQ ID NO: 706 - protein, 1345 aa, Streptococcus mutans
MKKPYSIGLDIGTNSVGWAVVTDDYKVPAKKMKVLGNTDKSHIKKNLLGALLFDSGNTAEDRRLKRTARRRYTRRRNRILYLQEIFSEEMGKVDDSFFHRLEDSFLVTEDKRGERHPIFGNLEEEVKYHENFPTIYHLRQYLADNPEKTDLRLVYLALAHIIKFRGHFLIEGKFDTRNNDVQRLFQEFLAVYDNTFENSSLQEQNVQVEEILTDKISKSAKKDRVLKLFPNEKSNGRFAEFLKLIVGNQADFKKHFELEEKAPLQFSKDIYEEELEVLLAQIGDNYAELFLSAKKLYDSILLSGILTVTDVSTKAPLSASMIQRYNEHQMDLAQLKQFIRQKLSDKYNEVFSDVSKDGYAGYIDGKTNQEAFYKYLKGLLNKIEGSGYFLDKIEREDFLRKQRTFDNGSIPHQIHLQEMRAIIRRQAEFYPFLADNQDRIEKILTFRIPYYVGPLARGKSDFAWLSRKSADKITPWNFDEIVDKESSAEAFINRMTNYDLYLPNQKVLPKHSLLYEKFTVYNELTKVKYKTEQGKTAFFDANMKQEIFDGVFKVYRKVTKDKLMDFLEKEFDEFRIVDLTGLDKENKAFNASYGTYHDLRKILDKDFLDNSKNEKILEDIVLTLTLFEDREMIRKRLKNYSDLLTKEQLKKLERRHYTGWGRLSAELIHGIRNKESRKTILDYLIDDGNSNRNFMQLINDDALSFKEEIAKAQVIGETDNLNQVVSDIAGSLAIKKGILQSLKIVDELVKIMGHQPENIVVEMARENQFTNQGRRNSQQRLKGLTDSIKEFGSQILKEHPVENSQLQNDRLFLYYLQNGRDMYTGEELDIDYLSQYDIDHIIPQAFIKDNSIDNRVLTSSKENRGKSDDVPSKDVVRKMKSYWSKLLSAKLITQRKFDNLTKGERGGLTDDDKAGFIKRQLVETRQITKHVARILDERFNTETDENNKKIRQVKIVTLKSNLVSNFRKEFELYKVREINDYHHAHDAYLNAVIGKALLGVYPQLEPEFVYGDYPHFHGHKENKATAKKFFYSNIMNFFKKDDVRTDKNGEIIWKKDEYISNIKKVLSYPQVNIVKKVEEQTGGFFKESILPKGDSDKLIPRKTKKFYWDTKKYGGFDSPIVAYSILVIADIEKGKSKKLKTVKALVGVTIMEKMTFERDPVAFLERKGYRNVQEENIIKLPKYSLFKLENGRKRLLASARELQKGNEIVLPNHLGTLLYHAKNIHKVDEPKHLDYVDKHKDEFKELLDVVSNFSKKYTLAEGNLEKIKELYAQNNGEDLKELASSFINLLTFTAIGAPATFKFFDKNIDRKRYTSTTEILNATLIHQSITGLYETRIDLSKLGGD

SEQ ID NO: 707 - protein, 1345 aa, Streptococcus mutans
MKKPYSIGLDIGTNSVGWAVVTDDYKVPAKKMKVLGNTDKSHIKKNLLGALLFDSGNTAEDRRLKRTARRRYTRRRNRILYLQEIFSEEMGKVDDSFFHRLEDSFLVTEDKRGERHPIFGNLEEEVKYHENFPTIYHLRQYLADNPEKTDLRLVYLALAHIIKFRGHFLIEGKFDTRNNDVQRLFQEFLAVYDNTFENSSLQEQNVQVEEILTDKISKSAKKDRVLKLFPNEKSNGRFAEFLKLIVGNQADFKKHFELEEKAPLQFSKDIYEEELEVLLAQIGDNYAELFLSAKKLYDSILLSGILTVTDVSTKAPLSASMIQRYNEHQMDLAQLKQFIRQKLSDKYNEVFSDVSKDGYAGYIDGKTNQEAFYKYLKGLLNKIEGSGYFLDKIEREDFLRKQRTFDNGSIPHQIHLQEMRAIIRRQAEFYPFLADNQDRIEKILTFRIPYYVGPLARGKSDFAWLSRKSADKITPWNFDEIVDKESSVEAFINRMTNYDLYLPNQKVLPKHSLLYEKFTVYNELTKVKYKTEQGKTAFFDANMKQEIFDGVFKVYRKVTKDKLMDFLEKEFDEFRIVDLTGLDKENKAFNASYGTYHDLRKILDKDFLDNSKNEKILEDIVLTLTLFEDREMIRKRLKNYSDLLTKEQLKKLERRHYTGWGRLSAELIHGIRNKESRKTILDYLIDDGNSNRNFMQLINDDALSFKEEIAKAQVIGETDNLNQVVSDIAGSPAIKKGILQSLKIVDELVKIMGHQPENIVVEMARENQFTNQGRRNSQQRLKGLTDSIKEFGSQILKEHPVENSQLQNDRLFLYYLQNGRDMYTGEELDIDYLSQYDIDHIIPQAFIKDNSIDNRVLTSSKENRGKSDDVPSKDVVRKMKSYWSKLLSAKLITQRKFDNLTKAERGGLTDDDKAGFIKRQLVETRQITKHVARILDERFNTETDENNKKIRQVKIVTLKSNLVSNFRKEFELYKVREINDYHHAHDAYLNAVIGKALLGVYPQLEPEFVYGDYPHFHGHKENKATAKKFFYSNIMNFFKKDDVRTDKNGEIIWKKDEHISNIKKVLSYPQVNIVKKVEEQTGGFSKESILPKGNSDKLIPRKTKKFYWDTKKYGGFDSPIVAYSILVIADIEKGKSKKLKTVKALVGVTIMEKMTFERDPVAFLERKGYRNVQEENIIKLPKYSLFKLENGRKRLLASARELQKGNEIVLPNHLGTLLYHAKNIHKVDEPKHLDYVDKHKDEFKELLDVVSNFSKKYTLAEGNLEKIKELYAQNNGEDLKELASSFINLLTFTAIGAPATFKFFDKNIDRKRYTSTTEILNATLIHQSITGLYETRIDLNKLGGD

SEQ ID NO: 708 - protein, 1345 aa, Streptococcus mutans; identical to SEQ ID NO: 707

SEQ ID NO: 709 - protein, 1345 aa, Streptococcus mutans; identical to SEQ ID NO: 704

SEQ ID NO: 710 - protein, 1345 aa, Streptococcus mutans; identical to SEQ ID NO: 705

SEQ ID NO: 711 - protein, 1345 aa, Streptococcus mutans; identical to SEQ ID NO: 706

SEQ ID NO: 712 - protein, 1345 aa, Streptococcus mutans
MKKPYSIGLDIGTNSVGWAVVTDDYKVPAKKMKVLGNTDKSHIKKNLLGALLFDSGNTAEDRRLKRTARRRYTRRRNRILYLQEIFSEEMGKVDDSFFHRLEDSFLVTEDKRGERHPIFGNLEEEVKYHENFPTIYHLRQYLADNPEKVDLRLVYLALAHIIKFRGHFLIEGKFDTRNNDVQKLFQEFLAVYDNTFENSSLQEQNVQVEEILTDKISKSAKKDRVLKLFPNEKSNGRFAEFLKLIVGNQADFKKHFELEEKAPLQLSKDTYEEELEVLLAQIGDNYAELFLSAKKLYDSILLSGILTVTDVSTKAPLSASMIQRYNEHQMDLAQLKQFIRQKLSDKYNEVFSDVSKDGYAGYIDGKTNQEAFYKYLKGLLNKIEGSGYFLDKIEREDFLRKQRTFDNGSIPHQIHLQEMRAIIRRQAEFYPFLADNQDRIEKILTFRIPYYVGPLARGKSDFAWLSRKSADKITPWNFDEIVDKESSVEAFINRMTNYDLYLPNQKVLPKHSLLYEKFTVYNELTKVKYKTEQGKTAFFDANMKQEIFDGVFKVYRKVTKDKLMDFLEKEFDEFRIVDLTGLDKENKAFNASYGTYHDLRKILDKDFLDNSKNEKILEDIVLTLTLFEDREMIRKRLENYSDLLTKEQVKKLERRHYTGWGRLSAELIHGIRNKESRKTLLDYLIDDGNSNRNFMQLINDDALSFKEEIAKAQVIGETDNLNQVVSDIAGSPAIKKGILQSLKIVDELVKIMGHQPENIVVEMARENQFTNQGRRNSQQRLKGLTDSIKEFGSQILKEHPVENSQLQNDRLFLYYLQNGRDMYTGEELDIDYLSQYDIDHIIPQAFIKDNSIDNRVLTSSKENRGKSDDVPSKDVVRKMKSYWSKLLSAKLITQRKFDNLTKAERGGLTDDDKAGFIKRQLVETRQITKHVARILDERFNTETDENNKKIRQVKIVTLKSNLVSNFRKEFELYKVREINDYHHAHDAYLNAVIGKALLGVYPQLEPEFVYGDYPHFHGHKENKATAKKFFYSNIMNFFKKDDVRTDKNGEIIWKKDEYISNIKKVLSYPQVNIVKKVEEQTGGFSKESILPKGNSDKLIPRKTKKFYWDTKKYGGFDSPIVAYSILVIADIEKGKSKKLKTVKALVGVTIMEKMTFERDPIAFLERKGYRNVQEENIIKLPKYSLFKLENGRKRLLASARELQKGNEIVLPNHLGTLLYHAKNIHKVDEPKHLDYVDKHKDEFKELLDVVSNFSKKYTLAEGNLEKIKELYAQNNGEDLKELASSFINLLTFTAIGAPATFKFFDKNIDRKRYTSTTEILNATLIHQSITGLYETRIDLSKLGGD

SEQ ID NO: 713 - protein, 1345 aa, Streptococcus mutans; identical to SEQ ID NO: 712

SEQ ID NO: 714 - protein, 1345 aa, Streptococcus mutans
MKKPYSIGLDIGTNSVGWAVVTDDYKVPAKKMKVLGNTDKSHIKKNLLGALLFDSGNTAEDRRLKRTARRRYTRRRNRILYLQEIFSEEMGKVDDSFFHRLEDSFLVTEDKRGERHPIFGNLEEEVKYHENFPTIYHLRQYLADNPEKVDLRLVYLALAHIIKFRGHFLIEGKFDTRNNDVQRLFQEFLAVYDNTFENSSLQEQNVQVEEILTDKISKSAKKDRVLKLFPNEKSNGRFAEFLKLIVGNQADFKKHFELEEKAPLQFSKDTYEEDLEELLGKIGDDYADLFTLAKNLYDAILLSGILTADDSSTKAPLSASMIQRYNEHQMDLAQLKQFIRQKLSDKYNEVFSDVSKDGYAGYIDGKTNQEAFYKYLKGLLNKIEGSGYFLDKIEREDFLRKQRTFDNGSIPHQIHLQEMRAIIRRQAEFYPFLADNQDRIEKILTFRIPYYVGPLARGKSDFAWLSRKSADKITPWNFDEIVDKESSAEAFINRMTNYDLYLPNQKVLPKHSLLYEKFTVYNELTKVKYKTEQGKTAFFDANMKQEIFDGVFKVYRKVTKDKLMDFLEKEFDEFRIVDLTGLDKENKVFNASYGTYHDLCKILDKDFLDNSKNEKILEDIVLTLTLFEDREMIRKRLENYSDLLTKEQVKKLERRHYTGWGRLSAELIHGIRNKESRKTILDYLIDDGNSNRNFMQLINDDALSFKEEIAKAQVIGETDNLNQVVSDIAGSPAIKKGILQSLKIVDELVKIMGHQPENIVVEMARENQFTNQGRRNSQQRLKGLTDSIKEFGSQILKEHPVENSQLQNDRLFLYYLQNGRDMYTGEELDIDYLSQYDIDHIIPQAFIKDNSIDNRVLTSSKENRGKSDDVPSKDVVRKMKSYWSKLLSAKLITQRKFDNLTKAERGGLTDDDKAGFIKRQLVETRQITKHVARILDERFYTETDENNKKIRQVKIVTLKSNLVSNFRKEFELYKVREINDYHHAHDAYLNAVIGKALLGVYPQLEPEFVYGDYPHFHGHKENKATAKKFFYSNIMNFFKKDDVRTDKNGEIIWKKDEHISNIKKVLSYPQVNIVKKVEEQTGGFSKESILPKGNSDKLIPRKTKKFYWDTKKYGGFDSPIVAYSILVIADIEKGKSKKLKTVKALVGVTIMEKMTFERDPVAFLERKGYRNVQEENIIKLPKYSLFKLENGRKRLLASARELQKGNEIVLPNHLGTLLYHAKNIHKVDEPKHLDYVDKHKDEFKELLDVVSNFSKKYTLAEGNLEKIKELYAQNNGEDLKELASSFINLLTFTAIGAPATFKFFDKNIDRKRYTSTTEILNATLIHQSITGLYETRIDLSKLGGD

SEQ ID NO: 715 - protein, 1345 aa, Streptococcus mutans
MKKPYSIGLDIGTNSVGWAVVTDDYKVPAKKMKVLGNTDKSHIKKNLLGALLFDSGNTAEDRRLKRTARRRYTRRRNRILYLQEIFSEEMGKVDDSFFHRLEDSFLVTEDKRGERHPIFGNLEEEVKYHENFPTIYHLRQYLADNPEKVDLRLVYLALAHIIKFRGHFLIEGKFDTRNNDVQRLFQEFLAVYDNTFENSSLQEQNVQVEEILTDKISKSAKKDRVLKLFPNEKSNGRFAEFLKLIVGNQADFKKHFELEEKAPLQFSKDTYEEDLEELLGKIGDDYADLFTLAKNLYDAILLSGILTADDSSTKAPLSASMIQRYNEHQMDLAQLKQFIRQKLSDKYNEVFSDVSKDGYAGYIDGKTNQEAFYKYLKGLLNKIEGSGYFLDKIEREDFLRKQRTFDNGSIPHQIHLQEMRAIIRRQAEFYPFLADNQDRIEKILTFRIPYYVGPLARGKSDFAWLSRKSADKITPWNFDEIVDKESSAEAFINRMTNYDLYLPNQKVLPKHSLLYEKFTVYNELTKVKYKTEQGKTAFFDANMKQEIFDGVFKVYRKVTKDKLMDFLEKEFDEFRIVDLTGLDKENKVFNASYGTYHDLCKILDKDFLDNSKNEKILEDIVLTLTLFEDREMIRKRLENYSDLLTKEQVKKLERRHYTGWGRLSAELIHGIRNKESRKTILDYLIDDGNSNRNFMQLINDDALSFKEEIAKAQVIGETDNLNQVVSDIAGSPAIKKGILQSLKIVDELVKIMGHQPENIVVEMARENQFTNQGRRNSQQRLKGLTDSIKEFGSQILKEHPVENSQLQNDRLFLYYLQNGRDMYTGEELDIDYLSQYDIDHIIPQAFIKDNSIDNRVLTSSKENRGKSDDVPSKDVVRKMKPYWSKLLSAKLITQRKFDNLTKAERGGLTDDDKAGFIKRQLVETRQITKHVARILDERFNTETDENNKKIRQVKIVTLKSNLVSNFRKEFELYKVREINDYHHAHDAYLNAVIGKALLGVYPQLEPEFVYGDYPHFHGHEENKATAKKFFYSNIMNFFKKDDVRTDKNGEIIWKKDEHISNIKKVLSYPQVNIVKKVEEQTGGFSKESILPKGNSDKLIPRKTKKFYWDTKKYGGFDSPIVAYSILVIADIEKGKSKKLKTVKALVGVTIMEKMTFERDPVAFLERKGYRNVQEENIIKLPKYSLFKLENGRKRLLASARELQKGNEIVLPNHLGTLLYHAKNIHKVDEPKHLDYVDKHKDEFKELLDVVSNFSKKYTLAEGNLEKIKELYAQNNGEDLKELASSFINLLTFTAIGAPATFKFFDKNIDRKRYTSTTEILNATLIHQSITGLYETRIDLSKLGGD

SEQ ID NO: 716 - protein, 1345 aa, Streptococcus mutans
MKKPYSIGLDIGTNSVGWAVVTDDYKVPAKKMKVLGNTDKSHIKKNLLGALLFDSGNTAEDRRLKRTARRRYTRRRNRILYLQEIFSEEMGKVDDSFFHRLEDSFLVTEDKRGERHPIFGNLEEEVKYHENFPTIYHLRQYLADNPEKVDLRLVYLALAHIIKFRGHFLIEGKFDTRNNDVQRLFQEFLAVYDNTFENSSLQEQNVQVEEILTDKISKSAKKDRVLKLFPNEKSNGRFAEFLKLIVGNQADFKKHFELEEKAPLQFSKDTYEEELEVLLAQIGDNYAELFLSAKKLYDSILLSGILTVTDVSTKAPLSASMIQRYNEHQMDLAQLKQFIRQKLSDKYNEVFSDVSKDGYAGYIDGKTNQEAFYKYLKGLLNKIEGSGYFLDKIEREDFLRKQRTFDNGSIPHQIHLQEMRAIIRRQAEFYPFLADNQDRIEKILTFRIPYYVGPLARGKSDFAWLSRKSADKITPWNFDEIVDKESSAEAFINRMTNYDLYLPNQKVLPKHSLLYEKFTVYNELTKVKYKTEQGKTAFFDANMKQEIFDGVFKVYRKVTKDKLMDFLEKEFDEFRIVDLTGLDKENKVFNASYGTYHDLCKILDKDFLDNSKNEKILEDIVLTLTLFEDREMIRKRLENYSDLLTKEQVKKLERRHYTGWGRLSAELIHGIRNKESRKTILDYLIDDGNSNRNFMQLINDDALSFKEEIAKAQVIGETDNLNQVVSDIAGSPAIKKGILQSLKIVDELVKIMGHQPENIVVEMARENQFTKQGRRNSQQRLKGLTDSIKEFGSQILKEHPVENSQLQNDRLFLYYLQNGRDMYTGEELDIDYLSQYDIDHIIPQAFIKDNSIDNRVLTSSKENRGKSDDVPSKDVVRKMKSYWSKLLSAKLITQRKFDNLTKAERGGLTDDDKAGFIKRQLVETRQITKHVARILDERFYTETDENNKKIRQVKIVTLKSNLVSNFRKEFELYKVREINDYHHAHDAYLNAVIGKALLGVYPQLEPEFVYGDYPHFHGHKENKATAKKFFYSNIMNFFKKDDVRTDKNGEIIWKKDEHISNIKKVLSYPQVNIVKKVEEQTGGFSKESILPKGNSDKLIPRKTKKFYWDTKKYGGFDSPIVAYSILVIADIEKGKSKKLKTVKALVGVTIMEKMTFERDPVAFLERKGYRNVQEENIIKLPKYSLFKLENGRKRLLASARELQKGNEIVLPNHLGTLLYHAKNIHKVDEPKHLDYVDKHKDEFKELLDVVSNFSKKYTLAEGNLEKIKELYAQNNGEDLKELASSFINLLTFTAIGAPATFKFFDKNIDRKRYTSTTEILNATLIHQSITGLYETRIDLSKLGGD

SEQ ID NO: 717 - protein, 1345 aa, Streptococcus mutans
MKKPYSIGLDIGTNSVGWAVVTDDYKVPAKKMKVLGNTDKSHIKKNLLGALLFDSGNTAEDRRLKRTARRRYTRRRNRILYLQEIFSEEMGKVDDSFFHRLEDSFLVTEDKRGERHPIFGNLEEEVKYHENFPTIYHLRQYLADNPEKVDLRLVYLALAHIIKFRGHFLIEGKFDTRNNDVQRLFQEFLAVYDNTFENSSLQEQNVQVEEILTDKISKSAKKDRVLKLFPNEKSNGRFAEFLKLIVGNQADFKKHFELEEKAPLQFSKDTYEEELEVLLAQIGDNYAELFLSAKKLYDSILLSGILTVTDVSTKAPLSASMIQRYNEHQMDLAQLKQFIRQKLSDKYNEVFSDVSKDGYAGYIDGKTNQEAFYKYLKGLLNKIEGSGYFLDKIEREDFLRKQRTFDNGSIPHQIHLQEMRAIIRRQAEFYPFLADNQDRIEKILTFRIPYYVGPLARGKSDFAWLSRKSADKITPWNFDEIVDKESSAEAFINRMTNYDLYLPNQKVLPKHSLLYEKFTVYNELTKVKYKTEQGKTAFFDANMKQEIFDGVFKVYRKVTKDKLMDFLEKEFDEFRIVDLTGLDKENKVFNASYGTYHDLCKILDKDFLDNSKNEKILEDIVLTLTLFEDREMIRKRLENYSDLLTKEQVKKLERRHYTGWGRLSAELIHGIRNKESRKTILDYLIDDGNSNRNFMQLINDDALSFKEEIAKAQVIGETDNLNQVVSDIAGSPAIKKGILQSLKIVDELVKIMGHQPENIVVEMARENQFTKQGRRNSQQRLKGLTDSIKEFGSQILKEHPVENSQLQNDRLFLYYLQNGRDMYTGEELDIDYLSQYDIDHIIPQAFIKDNSIDNRVLTSSKENRGKSDDVPSKDVVRKMKSYWSKLLSAKLITQRKFDNLTKAERGGLTDDDKAGFIKRQLVETRQITKHVARILDERFYTETDENNKKIRQVKIVTLKSNLVSNFRKEFELYKVREINDYHHAHDAYLNAVIGKALLGVYPQLEPEFVYGDYPHFHGHKENKATAKKFFYSNIMNFFKKDDVRTDRNGEIIWKKDEHISNIKKVLSYPQVNIVKKVEEQTGGFSKESILPKGNSDKLIPRKTKKFYWDTKKYGGFDSPIVAYSILVIADIEKGKSKKLKTVKALVGVTIMEKMTFERDPVAFLERKGYRNVQEENIIKLPKYSLFKLENGRKRLLASARELQKGNEIVLPNHLGTLLYHAKNIHKVDEPKHLDYVDKHKDEFKELLDVVSNFSKKYTLAEGNLEKIKELYAQNNGEDLKELASSFINLLTFTAIGAPATFKFFDKNIDRKRYTSTTEILNATLIHQSITGLYETRIDLSKLGGD

SEQ ID NO: 718 - protein, 1345 aa, Streptococcus mutans
MKKPYSIGLDIGTNSVGWAVVTDDYKVPAKKMKVLGNTDKSHIKKNLLGALLFDSGNTAEDRRLKRTARRRYTRRRNRILYLQEIFSEEMGKVDDSFFHRLEDSFLVTEDKRGERHPIFGNLEEEVKYHENFPTIYHLRQYLADNPEKVDLRLVYLALAHIIKFRGHFLIEGKFDTRNNDVQRLFQEFLAVYDNTFENSSLQEQNVQVEEILTDKISKSAKKDRVLKLFPNEKSNGRFAEFLKLIVGNQADFKKHFELEEKAPLQFSKDTYEEELEVLLAQIGDNYAELFLSAKKLYDSILLSGILTVTDVSTKAPLSASMIQRYNEHQMDLAQLKQFIRQKLSDKYNEVFSDVSKDGYAGYIDGKTNQEAFYKYLKGLLNKIEGSGYFLDKIEREDFLRKQRTFDNGSIPHQIHLQEMRAIIRRQAEFYPFLADNQDRIEKILTFRIPYYVGPLARGKSDFAWLSRKSADKITPWNFDEIVDKESSAEAFINRMTNYDLYLPNQKVLPKHSLLYEKFTVYNELTKVKYKTEQGKTAFFDANMKQEIFDGVFKVYRKVTKDKLMDFLEKEFDEFRIVDLTGLDKENKVFNASYGTYHDLCKILDKDFLDNSKNEKILEDIVLTLTLFEDREMIRKRLENYSDLLTKEQVKKLERRHYTGWGRLSAELIHGIRNKESRKTILDYLIDDGNSNRNFMQLINDDALSFKEEIAKAQVIGETDNLNQVVSDIAGSPAIKKGILQSLKIVDELVKIMGHQPENIVVEMARENQFTNQGRQNSQQRLKGLTDSIKEFGSQILKEHPVENSQLQNDRLFLYYLQNGRDMYTGEELDIDYLSQYDIDHIIPQAFIKDNSIDNRVLTSSKENRGKSDDVPSEDVVRKMKSYWSKLLSAKLITQRKFDNLTKAERGGLTDDDKAGFIKRQLVETRQITKHVARILDERFYTETDENNKKIRQVKIVTLKSNLVSNFRKEFELYKVREINDYHHAHDAYLNAVIGKALLGVYPQLEPEFVYGDYPHFHGHKENKATAKKFFYSNIMNFFKKDDVRTDKNGEIIWKKDEHISNIKKVLSYPQVNIVKKVEEQTGGFSKESILPKGNSDKLIPRKTKKFYWDTKKYGGFDSPIVAYSILVIADIEKGKSKKLKTVKALVGVTIMEKMTFERDPVAFLERKGYRNVQEENIIKLPKYSLFKLENGRKRLLASARELQKGNEIVLPNHLGTLLYHAKNIHKVDEPKHLDYVDKHKDEFKELLDVVSNFSKKYTLAEGNLEKIKELYAQNNGEDLKELASSFINLLTFTAIGAPATFKFFDKNIDRKRYTSTTEILNATLIHQSITGLYETRIDLSKLGGD

SEQ ID NO: 719 - protein, 1345 aa, Streptococcus mutans; identical to SEQ ID NO: 718

SEQ ID NO: 720 - protein, 1345 aa, Streptococcus mutans; identical to SEQ ID NO: 714

SEQ ID NO: 721 - protein, 1345 aa, Streptococcus mutans; identical to SEQ ID NO: 715

SEQ ID NO: 722 - protein, 1345 aa, Streptococcus mutans; identical to SEQ ID NO: 716

SEQ ID NO: 723 - protein, 1345 aa, Streptococcus mutans; identical to SEQ ID NO: 717

SEQ ID NO: 724 - protein, 1345 aa, Streptococcus mutans; identical to SEQ ID NO: 716

SEQ ID NO: 725 - protein, 1345 aa, Streptococcus mutans; identical to SEQ ID NO: 716

SEQ ID NO: 726 - protein, 1345 aa, Streptococcus mutans; identical to SEQ ID NO: 716

SEQ ID NO: 727 - protein, 1345 aa, Streptococcus mutans; identical to SEQ ID NO: 717

SEQ ID NO: 728 - protein, 1345 aa, Streptococcus mutans
MKKPYSIGLDIGTNSVGWAVVTDDYKVPAKKMKVLGNTDKSHIKKNLLGALLFDSGNTAEDRRLKRTARRRYTRRRNRILYLQEIFSEEMGKVNDSFFHRLEDSFLVTEDKRGERHPIFGNLEEEVKYHENFPTIYHLRQYLADNPEKVDLRLVYLALAHIIKFRGHFLIEGKFDTRNNDVQRLFQEFLAVYDNTFENSSLQEQNVQVEEILTDKISKSAKKDRVLKLFPNEKSNGRFAEFLKLIVGNQADFKKHFELEEKAPLQFSKDTYEEELEVLLAQIGDNYAELFLSAKKLYDSILLSGILTVTDVSTKAPLSASMIQRYNEHQMDLAQLKQFIRQKLSDKYNEVFSDVSKDGYAGYIDGKTNQEAFYKYLKGLLNKIEGSGYFLDKIEREDFLRKQRTFDNGSIPHQIHLQEMRAIIRRQAEFYPFLADNQDRIEKILTFRIPYYVGPLARGKSDFAWLSRKSADKITPWNFDEIVDKESSAEAFINRMTNYDLYLPNQKVLPKHSLLYEKFTVYNELTKVKYKTEQGKTAFFDANMKQEIFDGVFKVYRKVTKDKLMDFLEKEFDEFRIVDLTGLDKENKVFNASYGTYHDLCKILDKDFLDNSKNEKILEDIVLTLTLFEDREMIRKRLENYSDLLTKEQVKKLERRHYTGWGRLSAELIHGIRNKESRKTILDYLIDDGNSNRNFMQLINDDALSFKEEIAKAQVIGETDNLNQVVSDIAGSPAIKKGILQSLKIVDELVKIMGHQPENIVVEMARENQFTKQGRRNSQQRLKGLTDSIKEFGSQILKEHPVENSQLQNDRLFLYYLQNGRDMYTGEELDIDYLSQYDIDHIIPQAFIKDNSIDNRVLTSSKENRGKSDDVPSKDVVRKMKSYWSKLLSAKLITQRKFDNLTKAERGGLTDDDKAGFIKRQLVETRQITKHVARILDERFYTETDENNKKIRQVKIVTLKSNLVSNFRKEFELYKVREINDYHHAHDAYLNAVIGKALLGVYPQLEPEFVYGDYPHFHGHKENKATAKKFFYSNIMNFFKKDDVRTDKNGEIIWKKDEYISNIKKVLSYPQVNIVKKVEEQTGGFSKESILPKGNSDKLIPRKTKKFYWDTKKYGGFDSPIVAYSILVIADIEKGKSKKLKTVKALVGVTIMEKMTFERDPIAFLERKGYRNVQEENIIKLPKYSLFKLENGRKRLLASARELQKGNEIVLPNHLGTLLYHAKNIHKVDEPKHLDYVDKHKDEFKELLDVVSNFSKKYTLAEGNLEKIKELYAQNNGEDLKELASSFINLLTFTAIGAPAAFKFFDKNIDRKRYTSTTEILNATLIHQSITGLYETRIDLSKLGGD

SEQ ID NO: 729 - protein, 1345 aa, Streptococcus mutans; identical to SEQ ID NO: 728

SEQ ID NO: 730 - protein, 1345 aa, Streptococcus mutans
MKKPYSIGLDIGTNSVGWAVVTDDYKVPAKKMKVLGNTDKSHIKKNLLGALLFDSGNTAEDRRLKRTTRRRYTRRRNRILYLQEIFSEEMGKVDDSFFHRLEDSFLVTEDKRGERHPIFGNLEEEVKYHENFPTIYHLRQYLADNPEKTDLRLVYLALAHIIKFRGHFLIEGKFDTRNNDVQRLFQEFLAVYDNTFENSSLQEQNVQVEEILTDKISKSAKKDRVLKLFPNEKSNGCFAEFLKLIVGNQADFKKHFELEEKAPLQFSKDTYEEELEVLLAQIGDNYAELFLSAKKLYDSILLSGILTVTDVSTKAPLSASMIQRYNEHQMDLTQLKQFIRQKLSDKYNEVFSDVSKDGYAGYIDGKTNQEAFYKYLKGLLNKIEGSGYFLDKIEREDFLRKQRTFDNGSIPHQIHLQEMRAIIRRQAEFYPFLADNQDRIEKLLTFRIPYYVGPLASGKSDFAWLSRKSADKITPWNFDEIVDKESSAEAFINRMTNYDLYLPNQKVLPKHSLLYEKFTVYNELTKVKYKTEQGKTAFFDANMKQEIFDGVFKVYRKVTKDKLMDFLEKEFDEFRIVDLTGLDKENKVFNASYGTYHDLCKILDKDFLDNSKNEKILEDIVLTLTLFEDREMIRKRLENYSDLLTKEQVKKLERRHYTGWGRLSAELIHGIRNKESRKTILDYLIDDGNSNRNFMQLINDDALSFKEEIAKAQVIGETDNLNQVVSDIAGSPAIKKGILQSLKIVDELVKIMGHQPENIVVEMARENQFTNQGRRNSQQRLKGLTDSIKEFGSQILKEHPVENSQLQNDRLFLYYLQNGRDMYTGEELDIDYLSQYDIDHIIPQAFIKDNSIDNRVLTSSKENRGKSDDVPSKDVVRKMKSYWSKLLSAKLITQRKFDNLTKAERGGLTDDDKAGFIKRQLVETRQITKHVARILDERFNTETDENNKKIRQVKIVTLKSNLVSNFRKEFELYKVREINDYHHAHDAYLNAVIGKALLGVYPQLEPEFVYGDYPHFHGHKENKATAKKFFYSNIMNFFKKDDVRTDKNGEIIWKKDEHISNIKKVLSYPQVNIVKKVEEQTGGFSKESILPKGNSDKLIPRKTKKFYWDTKKYGGFDSPIVAYSILVIADIEKGKSKKLKTVKALVGVTIMEKMTFERDPVAFLERKGYRNVQEENIIKLPKYSLFKLENGRKRLLASARELQKGNEIVLPNHLGTLLYHAKNIHKVDEPKHLDYVDKHKDEFKELLDVVSNFSKKYTLAEGNLEKIKELYAQNNGEDLKELASSFINLLTFTAIGAPATFKFFDKNIDRKRYTSTTEILNATLIHQSITGLYETRIDLSKLGGD

SEQ ID NO: 731 - protein, 1345 aa, Streptococcus mutans; identical to SEQ ID NO: 730

SEQ ID NO: 732 - protein, 1350 aa, Streptococcus mutans
MKKPYSIGLDIGTNSVGWAVVTDDYKVPAKKMTVLGNTDKSHIKKNLLGALLFDSGNTAADRRLKRTARRRYTRRRNRILYLQEIFAEEMSKVDDSFFHRLEDSFLVTEDKRGERHPIFGNLEEEVKYHENFPTIYHLRQYLADNPEKVDLRLVYLALAHIIKFRGHFLIEGKFDTRNNDVQRLFQEFLAVYDNTFENSSLQEQNVQVEEILTDKISKSAKKDRVLKLFPNEKSNGRFAEFLKLIVGNQADFKKHFELEEKTPLQFSKDTYEEELEVLLAQIGDNYAELFLSAKKLYDSILLSGILTVTDVSTKAPLSASMIQRYNEHQMDLAQLKQFIRQKLSDKYNEVFSDVSKDGYAGYIDGKTNQEAFYKYLKGLLNKIEGSGYFLDKIEREDFLRKQRTFDNGSIPHQIHLQEMRAIIRRQAEFYPFLADNQDRIEKILTFRIPYYVGPLARGKSDFAWLSRKSADKITPWNFDEIVDKESSAEAFINRMTNYDLYLPNQKVLPKHSLLYEKFTVYNELTKVKYKTEQGKTAFFDANMKQEIFDGVFKVYRKVTKDKLMDFLEKEFDEFRIVDLTGLDKENKAFNASYGTYHDLRKILDKDFLDNSKNEKILEDIVLTLTLFEDREMIRKRLENYSDLLTKEQVKKLERRHYTGWGRLSAELIHGIRNKESRKTILDYLIDDGNSNRNFMQLINDDALSFKEEIAKAQVIGETDNLNQVVSDIAGSPAIKKGILQSLKIVDELVKIMGHQPENIVVEMARENQFTNQGRRNSQQRLKGLTDSIKEFGSQILKEHPVENSQLQNDRLFLYYLQNGRDMYTGEELDIDYLSQYDIDHIIPQAFIKDNSIDNRVLTSSKENRGKSDDVPSEDVVNRMRPFWNKLLSSGLISQRKYNNLTKKELTPDDKAGFIKRQLVETRQITKHVARMLDERFNKEFDDNNKRIRRVKIVTLKSNLVSSFRKEFELYKVREINDYHHAHDAYLNAVVVKALLVKYPKLEPEFVYGEYPKYNSYRERKTATQKMFFYSNIMNMFKSKVKLADDQIVERPMIEVNDETGEIAWDKTKHITTVKKVLSYPQVNIVKKVEEQTIGQNGGLFDDNPKSPLEVIPSKLVPLKKALNPEKYGGYQKPTTAYPILLIVDTKQLIPISVMDKKRFEQNPVKFLKDKGYQQIEKNNFVKLPKYTLVDIGNGIKRLWASSKEVHKGNQLVVSKKSQDLLYHAHHLDNDYSNEYVKNHYQQFDILFNEITSFSKKCKLGKEHIQKIEEAYSKERDSASIEELADGFIKLLGFTQLGATSPFSFLGIKLNQKQYTGKKDYLLPCMEATLIHQSITGLYETRIDLSKLGGD

SEQ ID NO: 733 - protein, 1350 aa, Streptococcus mutans; identical to SEQ ID NO: 732

SEQ ID NO: 734 - protein, 1345 aa, Streptococcus mutans
MKKPYSIGLDIGTNSVGWAVVTDDYKVPDKKMKVLGNTDKSHIKKNLLGALLFDSGNTAEDRRLKRTARRRYTRRRNRILYLQEIFSEEMGKVDDSFFHRLEDSFLVTEDKRGERHPIFGNLEEEVKYHENFPTIYHLRQYLADNPEKTDLRLVYLALAHIIKFRGHFLIEGKFDTRNNDVQRLFQEFLAVYDNTFENSSLQEQNVQVEEILTDKISKSAKKDRVLKLFPNEKSNGRFAEFLKLIVGNQADFKKHFELEEKAPLQFSKDIYEEELEVLLAQIGDNYAELFLSAKKLYDSILLSGILTVTDVSTKAPLSASMIQRYNEHQMDLAQLKQFIRQKLSDKYNEVFSDVSKDGYAGYIDGKTNQEAFYKYLKGLLNKIEGSGYFLDKIEREDFLRKQRTFDNGSIPHQIHLQEMRAIIRRQAEFYPFLADNQDRIEKILTFRIPYYVGPLARGKSDFAWLSRKSADKITPWNFDEIVDKESSVEAFINRMTNYDLYLPNQKVLPKHSLLYEKFTVYNELTKVKYKTEQGKTAFFDANMKQEIFDGVFKVYRKVTKDKLMDFLEKEFDEFRIVDLTGLDKENKAFNASYGTYHDLRKILDKDFLDNSKNEKILEDIVLTLTLFEDREMIRKRLKNYSDLLTKEQLKKLERRHYTGWGRLSAELIHGIRNKESRKTILDYLIDDGNSNRNFMQLINDDALSFKEEIAKAQVIGETDNLNQVVSDIAGSPAIKKGILQSLKIVDELVKIMGHQPENIVVEMARENQFTNQGRRNSQQRLKGLTDSIKEFGSQILKEHPVENSQLQNDRLFLYYLQNGRDMYTGEELDIDYLSQYDIDHIIPQAFIKDNSIDNRVLTSSKENRGKSDDVPSKDVVRKMKSYWSKLLSAKLITQRKFDNLTKAERGGLTDDDKAGFIKRQLVETRQITKHVARILDERFYTETDENNKKIRQVKIVTLKSNLVSNFRKEFELYKVREINDYHHAHDAYLNAVIGKALLGVYPQLEPEFVYGDYPHFHGHKENKATAKKFFYSNIMNFFKKDDVRTDKNGEIIWKKDEHISNIKKVLSYPQVNIVKKVEEQTGGFSKESILPKGNSDKLIPRKTKKFYWDTKKYGGFDSPIVAYSILVIADIEKGKSKKLKTVKALVGVTIMEKMTFERDPVAFLERKGYRNVQEENIIKLPKYSLFKLENGRKRLLASARELQKGNEIVLPNHLGTLLYHAKNIHKVDEPKHLDYVDKHKDEFKELLDVVSNFSKKYTLAEGNLEKIKELYAQNNGEDLKELASSFINLLTFTAIGAPATFKFFDKNIDRKRYTSTTEILNATLIHQSITGLYETRIDLSKLGGD

SEQ ID NO: 735 - protein, 1345 aa, Streptococcus mutans
MKKPYSIGLDIGTNSVGWAVVTDDYKVSAKKMKVLGNTDKSHIKKNLLGALLFDSGNTAEDRRLKRTARRRYTRRRNRILYLQEIFAEEMSKVDDSFFHRLEDSFLVTEDKRGERHPIFGNLEEEVKYHENFPTIYHLRQYLADNPEKVDLRLVYLALAHIIKFRGHFLIEGKFDTRNNDVQRLFQEFLAVYDNTFENSSLQEQNVQVEEILTDKISKSAKKDRVLKLFPNEKSNGRFAEFLKLIVGNQADFKKHFELEEKAPLQFSKDTYEEELEVLLAQIGDNYAELFLSAKKLYDSILLSGILTVTDVSTKAPLSASMIQRYNEHQMDLAQLKQFIRQKLSDKYNEVFSDVSKDGYAGYIDGKTNQEAFYKYLKGLLNKIEGSGYFLDKIEREDFLRKQRTFDNGSIPHQIHLQEMRAIIRRQAEFYPFLADNQDRIEKILTFRIPYYVGPLARGKSDFAWLSRKSADKITPWNFDEIVDKESSAEAFINRMTNYDLYLPNQKVLPKHSLLYEKFTVYNELTKVKYKTEQGKTAFFDANMKQEIFDGVFKVYRKVTKDKLMDFLEKEFDEFRIVDLTGLDKENKAFNASYGTYHDLRKILDKDFLDNSKNEKILEDIVLTLTLFEDREMIRKRLENYSDLLTKEQVKKLERRHYTGWGRLSAELIHGIRNKESRKTILDYLIDDGNSNRNFMQLINDDALSFKEEIAKAQVIGETDNLNQVVSDIAGSPAIKKGILQSLKIVDELVKIMGHQPENIVVEMARENQFTNQGRRNSQQRLKGLTDSIKEFGSQILKEHPVEHSQLQNDRLFLYYLQNGRDMYTGEELDIDYLSQYDIDHIIPQAFIKDNSIDNRVLTSSKENRGKSDDVPSKNVVRKMKSYWSKLLSAKLITQRKFDNLTKAERGGLTDDDKAGFIKRQLVETRQITKHVARILDERFHTETDENNKKIRQVKIVTLKSNLVSNFRKEFELYKVREINDYHHTHDAYLNAVIGKALLGVYPQLEPEFVYGDYPHFHGHKENKATAKKFFYSNIMNFFKKDDVRTDKNGEIIWKKDEHISNIKKVLSYPQVNIVKKVEEQTGGFSKESILPKGNSDKLIPRKTKKFYWDTKKYGGFDSPIVAYSILVIADIEKGKSKKLKTVKALVGVTIMEKMTFERDPVAFLERKGYRNVQEENIIKLPKYSLFKLENGRKRLLASARELQKGNEIVLPNHLGTLLYHAKNIHKVDEPKHLDYVDKHKDEFKELLDVVSNFSKKYTLAEGNLEKIKELYAQNNGEDLKELASSFINLLTFTAIGAPATFKFFDKNIDRKRYTSTTEILNATLIHQSITGLYETRIDLSKLGGD

SEQ ID NO: 736 - protein, 1345 aa, Streptococcus mutans; identical to SEQ ID NO: 735

SEQ ID NO: 737 - protein, 1345 aa, Streptococcus mutans
MKKPYSIGLDIGTNSVGWSVVTDDYKVPAKKMKVLGNTDKSHIEKNLLGALLFDSGNTAEDRRLKRTARRRYTRRRNRILYLQEIFSEEMGKVDDSFFHRLEDSFLVTEDKRGERHPIFGNLEEEVKYHENFPTIYHLRQYLADNPEKVDLRLVYLALAHIIKFRGHFLIEGKFDTRNNDVQRLFQEFLAVYDNTFENSSLQEQNVQVEEILTDKISKSAKKDRVLKLFPNEKSNGRFAEFLKLIVGNQADFKKHFELEEKAPLQFSKDTYEEELEVLLAQIGDNYAELFLSAKKLYDSILLSGILTVTDVGTKAPLSASMIQRYNEHQMDLAQLKQFIRQKLSDKYNEVFSDVSKDGYAGYIDGKTNQEAFYKYLKGLLNKIEGSGYFLDKIEREDFLRKQRTFDNGSIPHQIHLQEMRAIIRRQAEFYPFLADNQDRIEKLLTFRIPYYVGPLARGKSDFAWLSRKSADKITPWNFDEIVDKESSAEAFINRMTNYDLYLPNQKVLPKHSLLYEKFTVYNELTKVKYKTEQGKTAFFDANMKQEIFDGVFKVYRKVTKDKLMDFLEKEFDEFRIVDLTGLDKENKVFNASYGTYHDLCKILDKDFLDNSKNEKILEDIVLTLTLFEDREMIRKRLENYSDLLTKEQVKKLERRHYTGWGRLSAELIHGIRNKESRKTILDYLIDDGNSNRNFMQLINDDALSFKEEIAKAQVIGETDNLNQVVSDIAGSPAIKKGILQSLKIVDELVKIMGHQPENIVVEMARENQFTNQGRRNSQQRLKGLTDSIKEFGSQILKEHPVENSQLQNDRLFLYYLQNGRDMYTGEELDIDYLSQYDIDHIIPQAFIKDNSIDNRVLTSSKENRGKSDDVPSKDVVRKMKSYWSKLLSAKLITQRKFDNLTKAERGGLTDDDKAGFIKRQLVETRQITKHVARILDERFNTETDENNKKIRQVKIVTLKSNLVSNFRKEFELYKVREINDYHHAHDAYLNAVIGKALLGVYPQLEPEFVYGDYPHFHGHKENKATAKKFFYSNIMNFFKKDDVRIDKNGEIIWKKDEHISNIKKVLSYPQVNIVKKVEEQTGGFSKESILPKGNSDKLIPRKTKKFYWDTKKYGGFDSPIVAYSILVIADIEKGKSKKLKTVKALVGVTIMEKMTFERDPVAFLERKGYRNVQEENIIKLPKYSLFKLENGRKRLLASARELQKGNEIVLPNHLGTLLYHAKNIHKVDEPKHLDYVDKHKDEFKELLDVVSNFSKKYTLAEGNLEKIKELYAQNNGEDLKELASSFINLLTFTAIGAPATFKFFDKNIDRKRYTSTTEILNATLIHQSITGLYETRIDLSKLGGD

SEQ ID NO: 738 - protein, 1345 aa, Streptococcus mutans; identical to SEQ ID NO: 737

SEQ ID NO: 739 - protein, 1355 aa, Streptococcus mutans
MKKSYSIGLDIGTNSVGWAVVTDDYKVPAKKMKVLGNTDKSHIKKNLLGALLFDSGNTAEDRRLKRTARRRYTRRRNRILYLQEIFSEEMGKVDDSFFHRLDESFLTDDDKNFDSHPIFGNKAEEDAYHQKFPTIYHLRKHLADSTEKADLRLVYLALAHMIKFRGHFLIEGELNAENTDVQKLFADFVGVYDRTFDDSHLSEITVDASSILTEKISKSRRLEKLINNYPKEKKNTLFGNLIALSLGLQPNFKTNFKLSEDAKLQFSKDTYEEDLEELLGKIGDDYADLFTLAKNLYDAILLSGILTADDSSTKAPLSASMIKRYAEHHEDLEKLKEFIKANKPELYHDIFKDETKNGYAGYIENGVKQDEFYKYLKNTLSKIAGSDYFLDKIEREDFLRKQRTFDNGSIPHQIHLQEMHAILRRQGDYYPFLKENQDRIEKILTFRIPYYVGPLARKNSRFAWAEYHSDEAVMPWNFDQVIDKESSAQAFIEHMTNNDLYLPNEKVLPKHSPLYEKYTVYNELTKIKYVTEIGEAKFFDANLKQEIFDGLFKHERKVTKKKLRTFLDKNFDEFRIVDIQGLDKETETFNASYATYQDLLKVIKDKVFMDNPENAEILENIVLTLTLFEDREMIKQRLAKYADVFDKKVIDQLARRHYTGWGRLSAKLLNGIRDKQSCKTIMDYLIDDAQSNRNLMQLITDDNLTFKDDIVKAQYVDNSDDLHQVVQSLAGSPAIKKGILQSLKIVDELVKVMGKEPEQIVVEMARENQTTAKGRRNSQQRYKRLKEAIKSLDRDLNHKILKEHPTDNQALQNNRLFLYYLQNGRDMYTGESLDINRLSDYDIDHVIPQAFIKDNSIDNRVLTSSKANRGKSDDVPSEDVVNRMRPFWNKLLSSGLISQRKYNNLTKKELTPDDKAGFIKRQLVETRQITKHVARMLDERFNKEFDDNNKRIRRVKIVTLKSNLVSSFRKEFELYKVREINDYHHAHDAYLNAVVVKALLVKYPKLEPEFVYGEYPKYNSYRERKTATQKMFFYSNIMNMFKSKVKLADDQIVERPMIEVNDETGEIAWDKTKHITTVKKVLSYPQVNIVKKVEEQTIGQNGGLFDDNPKSPLEVIPSKLVPLKKALNPEKYGGYQKPTTAYPILLIVDTKQLIPISVMDKKRFEQNPVKFLKDKGYQQIEKNNFVKLPKYTLVDIGNGIKRLWASSKEVHKGNQLVVSKKSQDLLYHAHHLDNDYSNEYVKNHYQQFDILFNEITSFSKKCKLGKEHIQKIEEAYSKERDSASIEELADGFIKLLGFTQLGATSPFSFLGIKLNQKQYTGKKDYLLPCMEATLIHQSITGLYETRIDLNKLGGD

SEQ ID NO: 740 - protein, 1355 aa, Streptococcus mutans; identical to SEQ ID NO: 739

SEQ ID NO: 741 - protein, 1125 aa, Streptococcus mutans
MTNGKILGLDIGIASVGVGIINAKTGNVEHASSRIFPAANADNNVERRSARGGRRLIRRKKHRLKRVEDLFEKYNIDTDFSNLNLNPYQLRVKGLNEQLSNEELFAILKNIAKRRGISYLDDAEDDSVGSSDYAKAIDENRKLLKKQTPGEIQLKRLEKYGQLRGNFTIQDENGEYHRLINVFSTSDYVKEARRILETQSYYNKFITESFVEDYIKILQGKRKYYVGPGNEKSRTDYGIYRTDGETLDNLFGILIGKCGFYPEEYRAAKASYTAQEYNFLNDLNNLTVPTETKKLSTEQKYQLVDFAKTASTLEAAKLLKEIAKLVGCQVEEIKGYRLDNKDKPDLHTFEPFRKLKSNLTTIAVENLSITTLDTLAHILTLNTEREGIEEAIQKELPNIFSDEQITGIIAVRKKNSQIFGKGWHSFSIKLMKELIPELYETSEEQMTILIRLKKVKTNSKITNRTKYINEQEVTDEIYNPVVSKSIRQTVKIINAAIKKYGAFDQIVIEMPRESNEEDERKFIADLQKSNAKEKDDAMKQAALLYNGKAELPHGVFHGHKELATKIRLWYQQGERCLYSGKHIDIHDLIHNQHMFEIDHVLPLSLSFDDSLANKVLVYSWANQEKGQRTPFQALPQMASAWSFRELRDYISKQKGISKKKRDYLLTEQDINKVEVKQKFIERNLVDTRYVSRVVLNTLQDALKVMNKETKISVIRGQFTSQLRRQWRIDKSRETYHHHAVDALIIAASSQLRLWKKQNNPMFAEDKHGQKINLDTGEVLSDDAYKELVYQAPYQGFVNTISSKSFEDEILFSYQVDSKVNRKISDATIYATRQAQLGKDKKEETYVLGKIKDIYSQAGYDAFRKKYDKDKAVFLMYQKDPETWEKVIEVILRDYKELDDKGKEIGNPFERYKVKHGFVRKYSRKNKGTEIKSLKYYDNKLGNHIDITPNNSKHSVVLQSINPWRADLYFNPETTKYELMGLKYADLSFEKGTGKYSISREKYDEIKEREGISSKSEFKFTLYKNDLILVKDIGNHKELIARFNSKNDTSKHYVELKPWNKAKFDSEEELIPAFGKVAKSGQFIKGLNKPDLSIYKVKTDILGHKYYIKKEGDKPKLNFENKIKNK

SEQ ID NO: 742 - protein, 1125 aa, Streptococcus mutans
MTNGKILGLDIGIASVGVGIINAKTGNVEHASSRIFPAANADNNVERRSARGGRRLIRRKKHRLKRVEDLFEKYNIDTDFSNLNLNPYQLRVKGLNEQLSNEELFAILKNIAKRRGISYLDDAEDDSVGSSDYAKAIDENRKLLKKQTPGEIQLKRLEKYGQLRGNFTIQDENGEYHRLINVFSTSDYVKEARRILETQSYYNKFITESFVEDYIKILQGKRKYYVGPGNEKSRTDYGIYRTDGETLDNLFGILIGKCGFYPEEYRAAKASYTAQEYNFLNDLNNLTVPTETKKLSTEQKYQLVDFAKTASTLGAAKLLKEIAKLVGCQVEEIKGYRLDNKDKPDLHTFEPFRKLKSNLTTIAVENLSITTLDTLAHILTLNTEREGIEEAIQKELPNIFSDEQITEIIAVRKKNSQIFGKGWHSFSIKLMKELIPELYETSEEQMTILTRLKKVKTNSKITNRTKYINEEEITDEIYNPVVSKSIRQTVKIINATIKKYGAFDQIIIEMPRESNEEDERKFIADLQKSNAKEKDDAMKQAALLYNGKDELPHDVFHGHKELATKIRLWYQQGERCLYSGKHIDIHDLIHNQHMFEIDHVLPLSLSFDDSLANKVLVYSWANQEKGQRTPFQALPQMASAWSFRELRDYISKQKGISKKKRDYLLTEQDINKVEVKQKFIERNLVDTRYVSRVVLNTLQDALKVMNKETKISVIRGQFTSQLRRQWRIDKSRETYHHHAVDALIIAASSQLRLWKKQNNPMFAEDKHGQKINLDTGEVLSDDAYKELVYQAPYQGFVNTISSKSFEDEILFSYQVDSKVNRKISDATIYATRQAQLGKDKKEETYVLGKIKDIYSQAGYDAFRKKYDKDKAVFLMYQKDPETWEKVIEVILRDYKELDDKGKEIGNPFERYKVKHGFVRKYSRKNKGTEIKSLKYYDNKLGNHIDITPNNSKHSVVLQSINPWRADLYFNPETTKYELMGLKYADLSFEKGTGKYSISREKYDEIKEREGISSKSEFKFTLYKNDLILVKDIGNHKELIARFNSKNDTSKHYVELKPWNKAKFDSEEELIPAFGKVAKSGQFIKGLNKPDLSIYKVKTDILGHKYYIKKEGDKPKLNFENKIKNK

SEQ ID NO: 743 - protein, 1125 aa, Streptococcus mutans; identical to SEQ ID NO: 742

SEQ ID NO: 744 - protein, 1125 aa, Streptococcus mutans; identical to SEQ ID NO: 741

SEQ ID NO: 745 - protein, 670 aa, Streptococcus oralis
MAKFNKNYSIGLDIGVSSVGYAVVTEDYRVPAFKFKVLGNTEKEKIKKNLIGSTTFVPAQSAQGTRVFRVNRRRIDRRNHRIAYLRDIFQKEIGKIDKNFYRRLDESFRVLGDKSEDIQIKQPFFGNKELETAYHKKYPTIYHLRKHLADADKNSPVADIREVYMALSHIFKYRGHFLTLGKIDPNNINMQNSWIDFIESCQDAFDLEISDESKTIAAIFKSSDNRQEKVKGILSYFQPELAKKDKSIFKQLLQLLFGLKTKFKECFELEEEPDLNFSKENYDENLENLLGTLEEDFPDVFAKLKILRDTILLSDMLTYTGATHARFSATMVERYEEHRKDLQRFKSFVKQNLSEQDYLDIFGRKTPNGFDVDKETKGYVGYISNKMVLTNKQKTIQQNFYDYISGKITGIEGAEYFLNKISDGTFLRKLRTTDNGTIPNQIHAYELEKIIERQGRDYPFLLENKDKLLSILTFKIPYYVGPLAKGNNSRFAWIKRTTSQDVLDNNDEDTKNGKIRPWNYHKLINMDETRDAFITNLIGNDIILLNEKVLPKRSLIYEEVMLQNELTRIKYKDKYGKIHFFDSELRQEIINNLFKTNSKRVSSAMLLAYLENFTNLQAVEIVSGIEKGKSLNSTLKTYNDLKTIFSEDLLDSEIYQKELEEIIKVITVFV

SEQ ID NO: 746 - protein, 1373 aa, Streptococcus oralis
MENKNYSIGLDIGTNSVGWAVITDDYKVPSKKMKVLGNTDKRFIKKNLIGALLFDEGTTAEARRLKRTARRRYTRRKNRLRYLQEIFAEEMSKVDSSFFHRLDDSFLIPEDKKGSKYPIFATLIEEKEYHKQFPTIYHLRKQLADSKEKTDLRLIYLALAHMIKYRGHFLYEDTFDIKNNDIQKIFNEFISIYNNTFEGNSLSGQNVQVEAIFTDKISKSAKRERVLKLFPDEKSTGLFSEFLKLIVGNQADFKKHFDLEEKAPLQFSRDTYDEDLENLLGQIGDDFADLFVAAKKLYDAILLSGILTVTDPSTKAPLSASMIERYENHQKDLATLKQFIKTNLPEKYDEVFSDQSKDGYAGYIDGKTTQESFYKYIKNLLSKFEGADYFLEKIEREDFLRKQRTFDNGSIPHQIHLQEMNAILRRQGEHYPFLKENKEKIEKILTFRIPYYVGPLARGNRDFAWLTRNSDQAIRPWNFEEIVDKASSAESFINKMTNYDLYLPEEKVLPKHSLLYETFAVYNELTKVKFIAEGLRDYQFLDSRQKKDIFYTLFKAEDKRKVTEKDIIQYLHTVDGYDGIELKGIEKQFNASLSTYHDLLKIIKDKEFMDDPNNEEILENIVHTLTIFEDREMIKQRLAQYDSLFDEKVIKALTRRHYTGWGKLSSKLINGIRDKQTGKTILDYLMDDGYNNRNFMQLINDDELSFKEIIKKAQVVGKTDDVKQVVQELPGSPAIKKGILQSIKLVDELVKVMGHEPESIVIEMARENQTTARGKKNSQQRYKRIEDSLKILASGLNAKILKEHPTDNIQLQNDRLFLYYLQNGRDMYTGKPLDINQLSSYDIDHIVPQAFIKDDSLDNRVLTSLKDNRGKSDNVPSLEVVEKMKTFWQQLLDSKLISYRKFNNLTKAERGGLDERDKVGFIKRQLVETRQITKHVAQILDARYNTEVNEKDKKNRTVKIITLKSNLVSNFRKEFRLYKIREINDYHHAHDAYLNAVVAKAILKKYPKLEPEFVYGDYQKYDLKRYISRSKDPKEIEKATEKYFFYSNLLNFFKEEVHYADGTIVKRENIEYSKDTGEIAWNKEKDFATIKKVLSLPQVNIVKKREVQTGGFSKESILPKGNSDKLIPRKTKDILWDTTKYGGFDSPVIAYSILLIADIEKGKAKRLKTVKTLVGITIMEKATFEKSPIAFLENKGYHNVRKENILCLPKYSLFELKNGRRRMLASAKELQKGNEIVLPVHLTTLLYHAKNIHRLDEPEHLEYIQKHRNEFKGLLNLVSEFSQKYVLADANLEKIKNLYADNEQADIEILANSFINLLTFTALGAPAAFKFFGKDVDRKRYTTVSEILNATLIHQSITGLYETRIDLSKLGED

SEQ ID NO: 747 - protein, 1371 aa, Streptococcus oralis
MENKNYSIGLDIGTNSVGWSVITDDYKVPSKKMKVLGNTDKRFIKKNLIGALLFDEGTTAEARRLKRTARRRYTRRKNRLRYLQEIFAEEMSKVDSSFFHRLDDSFLIPEDKRGSKYPIFATLAEEKEYHKQFPTIYHLRKQLADSKEKTDLRLIYLALAHMIKYRGHFLYEDTFDIKNNDIQKIFSEFISIYDNTFEGSSLSGQNAQVEAIFTDKISKSAKRERVLKLFPDEKSTGLFSEFLKLIVGNQADFKKHFDLGEKAPLQFSKDTYDEDLENLLGQIGDDFADLFLVAKKLYDAILLSGILTVTDPSTKAPLSASMIERYENHQKDLAVLKQFIKNNLPEKYDEVFSDQSKDGYAGYIDGKTTQEAFYKYIKNLLSKFEGTDYFLEKIEREDFLRKQRTFDNGSIPHQIHLQEMNAILRRQGEHYPFLKDNKEKIEKILTFRIPYYVGPLARGNRDFAWLTRNSDEAIRPWNFEEIVDKASSAEDFINKMTNYDLYLPEEKVLPKHSLLYETFAVYNELTKVKFIAEGLRDYQFLDSGQKKQIVTQLFKEKRKVTEKDIIQFLHNVDGYDGIELKGIEKQFNASLSTYHDLLKIIKDKEFMDDSKNEEILENIVHTLTIFEDREMIKQRLAQYDSLFDEKVIKALIRRHYTGWGKLSAKLIDGICDKQTGNTILDYLIDDGKNNRNFMQLINDDGLSFKEITQKAQVVGKTDDVKQVVQELPGSPAIKKGILQSIKIVDELVKVMGHTPESIVIEMARENQTTARGKKNSQQRYKRIEDALKNLASGLDSNILKEHPTNNIQLQNDRLFLYYLQNGRDMYTGKPLDINQLSSYDIDHIVPQAFIKDDSLDNRVLTSLKDNRGKSDNVPSIEVVQKRKAFWQQLLDSKLISERKFNNLTKAERGGLDERDKVGFIKRQLVETRQITKHVAQILDARFNKEVNEKDKKNRTVKIITLKSNLVSNFRKEFRLYKVREINDYHHAHDAYLNAVVAKAILKKYPKLEPEFVYGDYQKYDLKRYISRSRNPKEVEKATEKYFFYSNLLNFFKEEVHYADGTIVKRENIEYSKDTGEIAWNKEKDFATIKKVLSYPQVNIVKKREVQTGGFSKESILPKGNSDKLIPRKTKDILWETTKYGGFDSPVIAYSILLIADIEKGKAKKLKTVKTLVGITIMEKAAFEENPITFLENKGYHNVRKENILCLPKYSLFELENGRRRLLASAKELQKGNEIVLPVYLTTLLYHSKNVHKLDEPEHLEYIQKHRNEFKDLLNLVSEFSQKYVLADANLEKIQNLYADNEQADIEILANSFINLLTFTALGAPAAFKFFGKDIDRKRYTTVSEILNATLIHQSITGLYETRIDLSKLGED

SEQ ID NO: 748 - protein, 1121 aa, Streptococcus oralis
MNGLVLGLDIGIASVGVGILEKNSGKIIHANSRLFPAATADNNVERRKNRQARRLNRRKKHRGVRFQDLFEDYGLLTDFSKVSINLNPYRLRVDGLNQQLTNEELFIALKNIVKRRGISYLDDASEDGGAVSSDYGKAVEENRKLLAEQTPGQIQLERFEKYGQVRGDFTVVENGEKCRLINVFSTSAYRKEAEKILRKQQEFNNQITDEFIEDYLKILTGKRKYYHGPGNEKSRTDYGRFRTDGTTLDNIFGVLIGKCTFYPNEYRASKSSYTAQEFNLLNDLNNLTVPTETKKLSEEQKKVIVEYAKEAKTLGASTLLKYIVKMIDASVDQISGYRVDVNNKPEMHTFEVYRKMQSLETISVGELSRNVLDELAHILTLNTEREGIEEAINSKLMGVFSQDQVLELVQFRKNNSSLFSKGWHNFSLKLMMELIPELYETSEEQMTILTRLGKQKSKETSKRTKYIDEKELTEEIYNPVVAKSVRQAIKIINEATKKHGIFDNIVIEMARENNEEDAKKDYIKRQKANQDEKNAAMEKAAFQYNGKKELPGNIFNGHKELATKIRLWHQQGEKCLYTGKTIPISDLIHNQYKYEIDHILPLSLSFDDSLSNKVLVHATANQEKGQRTPFQALDSMDDAWSYREFKSYVKDLKSLSNKKKDYLLTEEDISKIEVKQKFIERNLVDTRYSSRVVLNALQDFYKSHQFDTTISVVRGQFTSQLRRKWGLEKSRETYHHHAVDALIIAASSQLRLWKKQNNPLITYKEGQFVDSQTGEIISLTDDEYKELVFKAPYDHFVDTLHSKTFEDGILFSYQVDSKYNRKISDATIYATRKAKLDKDKSEETYVLGKIKDIYSQAGYDAFIKIYNKDKRKFLMYHKDPQTFEKVIEEILRTYPSKERNDKNKEVPCNPFEKYRQENGPIRKYSKKGNGPEIKCLKYYDNKLGNYIDISPDGSDNQVVLQSLKPWRTDVYFNHQTKEYELMGLKYSDLSFEKGSGKYSISNEKYNSIKRIEGVNEQSEFKFTLYKNDLILIKDSENNEQKLFRFNSRNDTAKHYVELKPYDKARFDGQQELITILGNVAKGGQCLKGLNKSNISIFKVKTDVLGKKHIIKKEGDEPKLKF

SEQ ID NO: 749 - protein, 1134 aa, Streptococcus oralis
MNGLVLGLDIGIASVGVGILEKNSGKIVHASSRIFPAATADNNVERRKNRQARRLHRRKKHRGARLKDLFEYYGLLTDFSKVSINLNPYRLRVDGLDQQLTNEELFIALKNIVKRRGISYLDDASEDGGTVSSDYGKAVEENRKLLAEQTPGQIQLERFEKYGQLRGDFTVVENSEKCRLINVFSTSAYKKEAERILRKQQEFNNQITDEFIEDYLKILTGKRKYYHGPGNEKSRTDYGRFRTDGATLDNIFGILIGKCTFYPNEYRASKASYTAQEFNLLNDLNNLTVPTETKKLSEEQKKTIIEYAKSAKTLGASTLLKYIAKMIDASVDQIRGYRVDVNNKPEMHTFEVYRKMQSLETISVGELSRNILDELAHILTLNTEREGIEEAINTKLRDSFSQDQVLELVQFRKNNSSLFSKGWHNFSLKLMMELIPELYETSEEQMTILTRLGKQKSKETSKRTKYIDEKEVTEEIYNPVVAKSVRQAIKIINEATKKHGIFDNIVIEMARENNEEDAKKDYIKRQKANQDEKYAAMEKAAFQYNGKKELPDNIFHGHKELATKIRLWHQQGEKCLYTGKSIPISDLIHNQYKYEIDHILPLSLSFDDSLSNKVLVLATANQEKGQRTPFQALDSMDDAWSYREFKSYVKESKLLGNKKKEYLLTEEDISKIEVKQKFIERNLVDTRYSSRVVLNALQDFYKNHNFDTTISVVRGQFTSQLRRKWGLEKSRETYHHHAVDALIIAASSQLRLWKKQNNPLIAYKEGQFVDSQTGEIISLTDDEYKELVFKAPYDHFVDTLSSKTFEDSILFSYQVDSKFNRKISDATIYATRKAKLDKEKKEYTYTLGKIKDIYSLGTKTPSKTGFYKFLDLYNKDKSQFLMFQKDRKTWDEVIEKIMEQYRPFKEYDKAGKLVDFNPFEKYRQENGPIRKYSKKGNGPEIKSLKYYDILLGKHKNITPEGSRNTVALLSLNPWRTDVYYNMETKKYEFLGLKYADLPFEEGGAYGISTETYNELREKEGIGKNSEFKFTLYKNDLILIKDTETNCQQFFRFWSRTGKDNPKSFEKHKIELKPYEKAKFEKGEELEVLGKVPPSSNQFQKNMQIENLSIYKVKTDVLGNKHFIKKEGDKPKLKF

SEQ ID NO: 750 - protein, 550 aa, Streptococcus oralis
MYSLDKNGSPTPLYRDQLNQYEVDHIIPYSFLPIDSIDNKVLTHRENNQRKLDNIPDKETVANMKPFWEKLYNAKLISQTKYQRLTTSERTPDGVLTESMKAGFIERQLVETRQIIKHVARILDNRFSDTKIITLKSQLVTNFRNTFHIAKIRELNDYHHAHDAYLAVVVGQTLLKAYPKLAPELIYGHHAHFNRHEENKATIRKYLYSNIMRFFNNPDSKVSKDIWDCNRDLPIIKDIIYNSQVNFVKRTMIKKGAFYNQNPVGKFNKQIAANNRYPLKTKVSSLDTSIYGGYGPMNSALSIIIIAERFNEKKCKIETVKEFHDIFIIDYKKFNNDPFQFLNDTSENGFLKKNNINRVLAFYRVPKYSLMQKIDGTRMLFESKSNLHKATQFKLTKTQNELFFHMRRLLTKSNLMDLKSESAIKESQNFILKHKEEFDNISNQLSAFSQKMLGDTTSLKNLIKGYNERKIKEINSSEETIKYFYDNFIKMFSFVKSGAPKDINDFFNNKYTVARMRPKPDKKLLNATLIHQSITGLYETRIDLSKLGED

SEQ ID NO: 751 - protein, 1140 aa, Streptococcus parasanguinis
MNGLVLGLDIGIASVGVGILKKDIGEIIHTNSRLFSAATADSNIERRGHRGGKRLTRRKKHRSIRLHDLFEDFGLLTDFSKVSINLNPYQLRVQGLDNQLTNEELFIALKNIVKRRGISYLDDASEDGGTVSSDYGKAVEENRKLLAEQTPGQIQLDRFEKYGQVRGDFNVVENGEKRRLINVFTTSAYSKEAERILRKQQEFNKKITDEFIEDYLTILTGKRKYYHGPGNEKSRTDYGRYTTKKDPEGKYITLDNIFGILIGKCTFYPDEYRASKASYTAQEFNLLNDLNNLTVPTETKKLSEEQKKTIIKYAKTAKTLGASTLLKYIAKLIGASVDQIHGYRIDPNKKPEMHTFETYRKMQSLETISVEELPRKVLDELAHILTLNTEREGIEEAINATLKDTFSQDQVLELVQFRKNNSSLFSKGWHSFSLKLMMELIPELYETSEEQMTILTRLGKQKSKETSKRTKYIDEKELTEEIYNPVVAKSVRQAIKIINEATKKYGIFDNIVIEMARENNEEDAKKEYIKRQKANLDEKNAAMEKAAFQYNGKKELPDNVFHGHKELATKIRLWHQQGEKCLYTGKNIPISDLIQNQYKYEIDHILPLSLSFDDSLSNKVLVLATANQEKGQRTPFQALDSMDDAWSYREFKSYVKDSKLLGNKKKEYLLTEEDISKIEVKQKFIERNLVDTRYSSRVVLNALQDFYKEHQFDTTISVVRGQFTSQLRRKWGLEKSRETYHHHAVDALIIAASSQLRLWKKQNNPLISYTEGQFVDQVTGEIISLSDDEYKELVFKAPYDHFVDTLKSKKFEDSILFSYQVDSKYNRKISDATIYATRKAKLDKENKEYTYTLGKIKDIYALGTKSPSKTGFYKFLDLYNKDKSQFLMFQKDRKTWDEVIEKIIEQYRPFKEYDENGKEVDFNPFEKYRIENGPIRKYSKKGNGPEIKSLKYYDNLLGKFVDITPSESKNPVALLSLNPWRTDVYYNTETSKYEFLGLKYADLCFEKGGAYGISEVKYNKIREKEGIGKESEFKFTLYKNDLILIKDTETNCQQIFRFWSRTGKDNPKSFEKHKIELKPYEKARFEKGEELEVLGKVPPSSNQLQKNMQIENLSIYKVKTDVLGNKHFIKKEGEEPKLKF

SEQ ID NO: 752 - protein, 1374 aa, Streptococcus pseudoporcinus
MKKRYSYSIGLDIGTNSVGWAVINEDYKVPAKKMTVFGNTDRKTIKKNLLGTVLFDSGETAQARRLKRTNRRRYTRRRYRLCQLQNIFATEMVKVDDTFFQRLSESFFYYQDKAFDKHPIFGNSKEERAYHKTYPTIYHLRKDLADRDQKADLRLIYLALSHIIKFRGHFLIEGKLNSENTDVQKLFIALVTVYNLLFEEEPIAGETCDAKALLTAKTSKSKRLESLISEFPGQKKNGLFGNLLALALGLRPNFKSNFGLSEDAKLQITKDTYEEELDNLLAEIGDHYADLFLAAKNLSDAILLSDILTLSDENTRAPLSASMIKRYEEHQEDLALLKKLVKEQMPEKYWEIFSNAKKNGYAGYIEGKVSQEDFYRYIKPILSRLKGGDEFLAKIDRDDFLRKQRTFDNGSIPHQIHLKELHAILRRQEKYYPFLAEQKEKIEQLLCFRIPYYVGPLAKGGNSSFAWLKRRSDEPITPWNFKDVVDEEASAQAFIEGMTNYDTYLPEEKVLPKHSPLYEMFTVYNELTKVKYIAENMTKPLYLSAEQKEAIIDHLFKQTRKVTVKDLKEKYFSQIEGLENVDVTGVEGAFNASLGTYNDLLKIIKDKAFLDDEANAEILEEIVLILTLFQDEKLIEKRLAKYANLFEKSVLKKLRKRHYRGWGRLSRQLIDGMKDKASGKTILDFLKADDFANRNFIQLINDSSLDFEKLIDDAQKKAIKRESLTEAVANLAGSPAIKKGILQSLKVVDEIVKVMGHNPDNIVIEMSRENQTTAQGLKNARQRLKKIKEVHKKTGSRILEDNSERITNLTLQDNRLYLYLLQDGKDMYTGQDLDINNLSQYDIDHIIPQSFIKDNSIDNLVLTTQKANRGKSDNVPSIEVVRDMKDRVWRRQLANGAISRQKFDHLTKAERGGLADSDKARFLRRQLVETRQITKHVAQLLDSRFNSKSNQNKKLARNVKIITLKSKIVSDFRKDFGLYKLREVNNYHHAHDAYLNAVVGTALLKKYPKLEAEFVYGDYKHFDLVKLISKSDPSLGKATAKVFFYSNIMNFFKEELSLADGTLMKRPVIETNTETGEVVWDKVKDFKTIRKVLSYPQVNIVKKTEIQSGAFSKESVLSKGNSDKLIERKKGWDPKKYGGFDSPNTAYSIFVVAKVAKRKAQKLKTVKEIVGITIMEQAEYEKDNIAFLEKKGYQDIQEKLLIKLPKYSLFELENGRRRLLASANEFQKGNELALSGKYMKFLYLASRYDKLSSKIESEQQKKLFVEQHLHYFDEILDIVVKHATCYIKAENNLKKIISLYKKKEAYSINEQALNMLNLFIFTSLGAPSTFVFFDETIDRKRYTTSSDVLNGILIQQSITGLYETRIDLSRFGGD

SEQ ID NO: 753 - protein, 1052 aa, Streptococcus pyogenes
LSASMIKRYDEHHQDLTLLKALVRQQLPEKYKEIFFDQSKNGYAGYIDGGASQEEFYKFIKPILEKMDGTEELLAKLNREDLLRKQRTFDNGSIPHQIHLGELHAILRRQEDFYPFLKDNREKIEKILTFRIPYYVGPLARGNSRFAWMTRKSEETITPWNFEEVVDKGASAQSFIERMTNFDKNLPNEKVLPKHSLLYEYFTVYNELTKVKYVTEGMRKPAFLSGEQKKAIVDLLFKTNRKVTVKQLKEDYFKKIECFDSVEISGVEDRFNASLGTYHDLLKIIKDKDFLDNEENEDILEDIVLTLTLFEDREMIEERLKTYAHLFDDKVMKQLKRRRYTGWGRLSRKLINGIRDKQSGKTILDFLKSDGFANRNFMQLIHDDSLTFKEDLQKAQVSGQGDSLHEHIANLAGSPAIKKGILQTVKVVDELVKVMGRHKPENIVIEMARENQTTQKGQKNSRERMKRIEEGIKELGSDILKEYPVENTQLQNEKLYLYYLQNGRDMYVDQELDINRLSDYDVDHIVPQSFLKDDSIDNKVLTRSDKNRGKSDNVPSEEVVKKMKNYWKQLLNAKLITQRKFDNLTKAERGGLSELDKAGFIKRQLVETRQITKHVAQILDSRMNTKYDENDKLIREVRVITLKSKLVSDFRKDFQFYKVREINNYHHAHDAYLNAVVGTALIKKYPKLESEFVYGDYKVYDIRKMIAKSEQEIGKATAKYFFYSNIMNFFKTEITLANGEIRKRPLIETNGETGEIVWDKGRDFATVRKVLSMPQVNIVKKTEVQTGGFSKESILPKRNSDKLIARKKDWDPKKYGGFDSPTVAYSVLVVAKVEKGKSKKLKSVKELVGITIMERSSFEKDPVDFLEAKGYKEVRKDLIIKLPKYSLFELENGRKRMLASAGELQKGNELALPSKYVNFLYLASHYEKLKGSPEDNEQKQLFVEQHKHYLDEIIEQISEFSKRVILADANLDKVLSAYNKHRDKPIREQAENIIHLFTLTNLGAPAAFKCFDTTIGRNRYKSIKEVLDATLIHQSITGLYETRIDLSQLGGD

SEQ ID NO: 754 - protein, 1368 aa, Streptococcus pyogenes; identical to SEQ ID NO: 42

SEQ ID NO: 755 - protein, 1367 aa, Streptococcus pyogenes; identical to SEQ ID NO: 246

SEQ ID NO: 756 - protein, 1368 aa, Streptococcus pyogenes [sequence omitted]

SEQ ID NO: 757 - protein, 1370 aa, Streptococcus ratti
MKKPYSIGLDIGTNSVGWAVITDDYKVPAKKMKVLGNTDKNYIKKNLLGALLFDSGNTAEDRRLKRTARRRYTRRRNRLLYLQDIFSDEMNKVDESFFHRLEDSFLVSEDKRGDHHPIFGNVVDEVKYHEQFPTIYHLRKYLADTPEKADLRLVYLALAHMIKFRGHFLIDDPKLDVKNTDSQELFSQFLTAYDVTQEDSHLADVKINISDIITEKMNKSRKVEALLFHFPSQKKNSFFGNLVSLVFGLLPNFKTNFNLAEDAKLQLSKDSYDEDLENLLGQIGDEYTDVFVAARKLYDSILLSGILTVNDLSTKAILSASMVRRYEEHNKDLAKLKAFVKANFTHDVFKEVFSDASKNGYAGYIEGKTSQEDFYKYVKNLIGKVDGSADFIEKIDREDFLRKQRTFDNGSIPHQVHLAEMKAILRRQGEYYPFLKEHAEKIQQILTFRIPYYVGPLDRHGHSDFAWASFNSEEKVTPWNFEEIIDKNKSAQAFIERMTNQDLYLPNEKVLPKHSPLYEKYTVYNELTKIKYVTETGTAKFFDANLKQEIFDGLFKKERKVTKRKLLTFLEKNFDEFRIVDIQGLDKETETFNASYGIYQDLLKIIKDKAFMDDSENADILEDIVLTLTLFEDREMIKQRLAKYADLFDKKVIDNLARRRYTGWGRLSAKLLNGIRDKRSRKTIMDYLVDDGRSNRNLMQLITDDNLTFKDEIAKAQYSDNSDDLHQVVQDLAGSPAIKKGILQSVKIVDELVKVMGYEPEQIVVEMARENQTTAKGRRNSQQRYKRLEEAIKNLDRDLNYKILKEHPTDNQALQNDRLFLYYLQNGRDMYTGESLDINRLSDYDIDHIIPQAFIKDNSIDNRVLVSSAKNRGKSDDVPSEDVVNRMRPFWNKLLNCGLISQRKYSNLTKKELTPNDKAGFIKRQLVETRQITKHVARILDEHFNKEFDEDKKRIRKVKVVTLKSNLVSNFRKEFELYKVREINDYHHAHDAYLNAVVAKALLMKYPKLEPEFVYGEYPKYNSYRERKTATQRMFFYSNIMNMFKSKVKLADERIIERPMIEVNDETGEIAWDKTKHIATVKKVLSYPQINIVKKVEEQTGGLTNETIYPRGSFDKLLNRKNTLEASKYGGFGSPTVAYCVLVVADSKNENGKVKKLKLGSELLGITILEKNDFENNSLDFLSRKGYQGVQEKKIIKLPKYSLFEFQDGSRRMLSSVMANDNKRGDLQKANEMILPAYLVKLLYHAKHINSVGEPAHKNYINEHCSEFQDLLNYIRQFADKFVDVDKNLSKIRSLSKSMAEYSVSEICSSFVNLLTLTALGAPADFKFFGTTIPRKRYGSPQSILSATLIHQSITGLYETRIDLSKLGED

SEQ ID NO: 758 - protein, 1135 aa, Streptococcus salivarius
MSDLVLGLDIGIGSVGVGILNKVTGEIIHKNSRIFPAAQAENNLERRTNRQGRRLTRRKKHRRVRLNHLFEESGLITDFTKVSINLNPYQLRVKGLTAELSNEELFIALKNMVKHRGISYLDDASDDGNSSVGDYAQIVKENSKQLETKTPGQIQLERYQKYGQLRGDFTVEEDGRKHRLINVFPTSAYHAEALRILQTQQEFNPQITDEFINSYLEILTGKRKYYHGPGNEKSRTDYGKYTTKKDAQGQYITLNNIFGILIGKCTFYPEEYRAAKASYTAQEFNLLNDLNNLTVPTETKKLSEEQKYQIITYVKNEKAMGPAKLFKYIAKLLACDIADIKGYRIDKSDKAEIHTFEAYRKMKTLETIDIEQIEREKLDKLAYVLTLNTEREGIQEALDHEFADGTFSQEQVDELVQFRKANSSIFGKGWHSFSVKLMMELIPELYATSEEQMTILTRLGKQKTTSSSNKTKYIDEKQLTEEIYNPVVAKSVRQAIKIVNAAIKKYGDFDNIVIEMARETNEDDEKKAIQKIQKANKAEKDAAMRKAANQYNGKAELPHSVFHGHKQLATKIRLWHQQGERCLYTGKTISIHDLINNPNQFEIDHILPLSITFDDSLANKVLVYATANQEKGQRTPYQALDSMDDAWSFRELKAFVRESKALSNKKKEYLLTEEDISKFDVRKKFIERNLVDTRYASRVVLNALQEHFKAHKIDTKVSVVRGQFTSQLRRHWGIDKTRDTYHHHAVDALIIAASSQLNLWKKQKNTLVSYSEDQLLDIETGELISDDEYKESVFKAPYQHFVDTLKSKEFEDSILFSYQVDSKFNRKISDATIYATRQAKVGKDKKDETYVLGKIKDIYALGTKTPSKTGFYKFLDLYNKDKSQFLVYQKDRKTWDEVIEKIMEQYRPFKESDKNGKEVDFNPFEKYRIENGPIRKYSRKGNGPEIKSLKYYASKLGNHIDITPKDSNNKVVLQSVSPWRADVYFNKTTGSYEILGLKYADLQFEKGTGTYRISEEKYNDIKKKEGVDSDSEFKFTLYKNDLLLIKDTETKEQRLFRFLSRSMPNKKHYVELKPYSKDKFEKNESLIEILGSADKSGRCIKGLAKSNLSIFKVRTDVLGNQHIIKNEGDKPKLDF

SEQ ID NO: 759 - protein, 1127 aa, Streptococcus salivarius
MSDLVLGLDIGIGSVGVGILNKVTGEIIHKNSRIFPAAQAENNVERRINRQGRRLTRRKKHRRVRLNHLFEESGLITDFTNVSINLNPYQLRVKGLTDELSNEELFIALKNMVKHRGISYLDDASDDGNSSVGDYAQIVKENSKQLETKTPGQIQLERYQKYGQLRGDFTVEEDGKKHRLINVFPTSAYRAEALRILQTQQEFNPQITDEFINSYLQILTGKRKYYHGPGNEKSRTDYGRYTTKKDSEDEYITLDNIFGILIGKCTFYPEEYRAAKASYTAQEFNLLNDLNNLTVPTETKKLSEEQKNQIITNVKNEKAMGPAKLFKYIAKLLSCDVADIKGYRIDKSDKAEIHTFEAYRKMKTLATIDIEQMERENLDKLAYVLTLNTEKEGIQEALEHEFADGTFSQEQIDELVQFRKANSSIFGKGWHSFSVKLMMELIPELYATSEEQMTILTRLGKQKTTSSSNKTKYIDEKQLTEEIYNPVAAKSVRQAIKIVNAAIKEYGDFDNIVIEMARETNEDDEKKAIQKIQKANKDEKDAAMLKAANQYNGKAELPHSVFHGHKQLATKIRLWHQQGERCLYTGKTISIHDLINNSNQFEIDHILPLSITFDDSLANKVLVYATANQEKGQRTPYQALDSMDDAWSFRELKAFVRDSKALSNKKKEYLLTEEDISKFDVRKKFIERNLVDTRYASRVVLNALQEHFRVHKTDTKVSVVRGQFTSQLRRHWGIEKTRDTYHHHAVDALIIAASSQLNLWKKQKNTLVSYSEDQLLDIETGELISDDEYKESVFKAPYQHFVDTLKSKEFEDSILFSYQVDSKFNRKISDATIYATRQAKVGKDKKDETYVLGKIKDIYSQTGYDAFIKIYKKDKSKFLMYRHDPQTFEKVIEPILENYPNKELNEKGKEVPCNPFLKYKEDHGYIRKYSKKGNGPEIKSLKYYDSKLGNHIDITPKNSNNKVVLQSVSPWRADVYFNKTTGKYEILGLKYADLKFEKGTGTYKISEEKYNDIKIKEGVDSDSEFKFTLYKNDLLLIKDTETKEQQLFRFLSRTMPNVKHYVELKPYDKQKFDDNEELIKILGIVAKGGQCKKGVSKPNISIYKIRTDVLGNQHIIKNEGDKPKLDF

SEQ ID NO: 760 - protein, 1385 aa, Streptococcus salivarius
MTKPYSIGLDIGTNSVGWAVITDDYKVPSKKMKVLGNTSKKYIKKNLLGALLFDSGITAEGRRLKRTARRRYTRRRNRILYLQEIFSTEMATLDDAFFQRLDDSFLVPDDKRDSKYPIFGNLVEEKVYHDEFPTIYHLRKHLADSSKKADLRLVYLALAHMIKYRGHFLIEGDFNSKNNDLQKNFQDFLDTYNAIFESDLSLENSKQLEEIVKDKISKSAKKDRILKLFPGEKNSGIFSEFLKLIVGNQADFRKYFNLDEKTSLQFSKESYDEDLETLLGHIGDDYSDVFLKAKKLYDAILLSGILTVTDNGTEAPLSSAMIMRYKEHEEDLALLKAYIRNISLETYNEVFKDNTKNGYAGYIDGKTSQEDFYVYLKRLLAGLEGADYFLEKIDREDFLRKQRTFDNGSIPYQIYLQEMRAILDKQAKFYPFLAKNKERIEKILTFRIPYYVGPLARGNSDFAWSIRKRNEKITPWNFEDVIDKESSAEAFINRMTSFDLYLPEEKVLPKHSLLYENFTVYNELTKVRFIAEGMRDYQFLDSKQKKDIVRLYFKGKRKVTDKDIIEYLHAIDGYDGIELKGIEKQFNSSLSTYHDLLNIINDKEFLDDSSNETIIEEIIHTLTMFEDREMIKQRLSKFDNIFDKSVLKKLSRRHYTGWGKLSAKLINGIRDEKSGNTILDYLIDDGVSNRNFMQLIHDDALSFKKKIKKAQIIGDKDNIKQVVKSLPGSPAIKKGILQSIKIVDELVKVMGREPESIVVEMARENQYTNQGKSNSQQRLKRLEESLKGLGSKILKENVPTRLSKIDNNALQNDRLYLYYLQNGKDMYTGEELDIDRLSNYDIDHIIPQAFLKDDSIDNKVLVSSASNRGKSDDVPSLEVVKKRKTLWYQLLKSKLISQRKFDNLTKAERGGLSQEEKAGFIQRQLVETRQITKHVARLLDERFNNKKDENNRTLRTVKIITLKSSLVSQFRKDFELYKVREINDFHHAHDAYLNAVVASALLKKYPKLEPEFVYGDYPKYNSFRERKSATEKVYFYSNIMNIFKKSIPLADGTVIDRPLIEVNEETGESVWNKVADLNTVRKVLSYSQVNIVKKVEEQNHGLDRGKPKGLFNANLSSKPKPNSKENLVGAKEYLDPKKYGGYAGISNSFAILVKGTIEKGAKKKITNVLEFQGISILDRIYYRKDKLNFLLEKGYKDIELIIELPKYSLFELSDGSRRMLASILSTNNKRGEIHKGNQIFISQKFVKLLYHAKRISSTFNENHRKYVENHKKEFEELFYYILEFNENYVGAKKNGELLKSAFQSWQNHSIDELCSSFIGPTGSERKGLFELTSRGGAADFEFLGVKIPRYRDYTPSSLLKDATLIHQSVTGLYETRIDLGKLGED

SEQ ID NO: 761 - protein, 1392 aa, Streptococcus sanguinis
MENKNYSIGLDIGTNSVGWAVITDDYKVPSKKMKVFGNTDKHFIKKNLIGALLFDEGATAEDRRLKRTARRRYTRRKNRLRYLQEIFSEEISKLDSSFFHRLDDSFLVPKDKRGSKYPIFATLEEEKEYHKKFPTIYHLRKHLADSKEKTDLRLIYLALAHMIKYRGHFLYEESFDIKNNDIQKIFNEFISIYDNTFEGSSLSGQNAQVEAIFTDKISKSAKRERVLKLFSDEKSTSLFSEFLKLIVGNQADFKKHFDLEEKAPLQFSKDTYDEDLENLLGQIGDGFTDLFLVAKKLYDAILLSGILTVTDPSTKAPLSASMIERYESHQKDLAALKQFIKNNLPKRYNEVFSDQSKDGYAGYIDGKTTQEAFYKYIKNLLSKFEGADYFLDKIEREDFLRKQRTFDNGSIPHQIHLQEMNAILRRQGEHYPFLKENREKIEKILTFRIPYYVGPLARGNRDFAWLTRNSDQAIRPWNFEEIVDKASSAEEFINKMTNYDLYLPEEKVLPKHSLLYETFAVYNELTKVKFIAEGLRDYQFLDSGQKKQIVNQLFKEKRKVTEKDIIHYLHNVDGYDGIELKGIEKQFNASLSTYHDLLKIIKDKEFMDDPKNEEILENIVHTLTIFEDREMIKQRLAQYDSIFDEKVIKALTRRHYTGWGKLSAKLINGICDKQTGDTILDYLIDDGKINRNFMQLINDDGLSFKEIIQKAQVVGKTDDVKQVVQELPGSPAIKKGILQSIKIVDELVKVMGYAPESIVIEMARENQTTARGKKNSQQRYKRIEDSLKNLAPGLDSNILKENPTDNIQLQNDRLFLYYLQNGKDMYTGKPLDIDQLSSYDIDHIIPQAFIKDDSIDNRVLTSSKDNRGKSDNVPSLEVVQKRKAFWQQLLDSKLISERKFNNLTKAERGGLDERDKVGFIRRQLVETRQITKHVAQILDASFNTEVNEKNQKIRTVKIITLKSNLVSNFRKEFELYKVREINDYHHAHDAYLNAVVAKAILKKYPKLEPEFVYGDYQKYDLKRYISRFKPSKEIEKATEKYFFYSNLLNFFKEEVHYADGIIVKRENIEYSKDTGEIAWNKEKDFATIKKVLSYPQVNIVKKTEIQTHGLDRGKPKGLFNSNPSPKPSEDSKENLVPIKQGLDPRKYGGYAGISNSYAVLVKAIVEKGAKKQQKTILEFQGISILDKINFENNKENYLLKKRYIEILSTITLPKYSLFEFPDGTRRRLASILSTNNKRGEIHKGNELVLPGKYTTLLYHAKNINKKLEPEHLEYVEKHRNDFAKLLECVLNFNDKYVGALKNGERIRQAFTDWETVDIEKLCFSFIGPENSKNAGLFELTSQGSASDFEFLGVKIPRYRDYAPSSLLKATLIHQSITGLYETRIDLSKLGED

SEQ ID NO: 762 - protein, 1377 aa, Streptococcus sanguinis
MKKPYSIGLDIGTNSVGWAVITDDYKVPSKKMKVLGNTDKHFIKKNLIGALLFDEGTTAEDRRLKRTSRRRYTRRKNRLRYLQEIFSEEISKLDSSFFHRLDDSFLVPEDKRGSKYPIFATLEEEKEYHKKFPTIYHLRKHLADSKEKTDLRLIYLALAHMIKYRGHFLYEESFDIKNNDIQKIFNEFISIYDNTFEGSSLSGQNAQVEAIFTDKISKSTKRERVLKLFSDEKSTGLFSEFLKLIVGNQADFKKHFDLEEKAPLQFSKDTYDEDLENLLGQIGDGFADLFLVAKKLYDAILLSGILTVTDPSTKAPLSASMIERYENHQEDLAALKQFIKNNLSEKYAEVFSDQSKDGYAGFIDGKTTQEAFYKYIKNLLSKLEGADYFLNKIEREDFLRKQRTFDNGSIPHQIHLQEMNAILRRQGEHYLFLKENREKIEKILAFRIPYYVGPLARGNRDFAWLTRNSDQAIRPWNFEEVVDKASSAEDFINKMTNYDLYLPEEKVLPKHSLLYETFAVYNELTKVKFIAEGLRDYQFLDSGQKKQIVNQLFKDKRKVTEKDIIHYLHNVDGYDGIELKGIEKQFNASLSTYHDLLKIIKDKEFMDNPKNGEILENIIHTLTIFEDREMIKQRLAQYDTLFDEKVIKALTRRHYTGWGKLSAKLINGIRDKQTGKTILEYLIDDGDCNRNFMQLINDDGLSFKEIIQKAQVVGKTDDVKQVVQEIPGSPAIKKGILQSIKIVDELVKVMGHNPESIVIEMARENQTTAKGKKNSQQRYKRIEDALKNLAPGLDSNILKENPTDNIQLQNDRLFLYYLQNGKDMYTGKAIDINQLSNYDIDHIIPQAFIKDDSLDNRVLTSSKDNRGKSDNVPSIEVVQKRKAFWQQLLDSKLISERKFNNLTKAKRGGLDERDKVGFIKRQLVETRQITKHVAQLLDTRFNTEVNEENQKIRTVKIITLKSNLVSNFRKEFGLYKVREINDYHHAHDAYLNAVVAKAILKKYPKLEPEFVYGDYQKYDLKRYILKSKASNTIDKATEKYFFYSNLLNFFKEKVRYADGTIKKRENIEYSNDTGEIAWNKEKDFATIKKVLSLPQVNIVKKTEEQTVGQNGGLFDNNIVSKKKVVDASKLIPIKSSLSPEKYGGYARPTIAYSVLVIADIEKGKGKAKKLKRIKEIVGITIQDKKKFESNPVTYLEECGYKNINSNLIIKLPKYSLFEFNDGQRRLLASSIELQKGNELILPYHLTALLYHAQRINKISEPIHKQYVEAHQNEFKELLTTIISLSKKYIQKPNVELLLQQAFDQADKDIYQLSESFISLLKLTSFGAPGAFKFLGVEISQSSVRYKPNSQFLDTTLIHQSITGLYETRIDLSKLGED

SEQ ID NO: 763 - protein, 1370 aa, Streptococcus sanguinis
MKKPYSIGLDIGTNSVGWAVVTDDYKVPAKKMRVFGDTDRSHIKKNLLGTLLFDDGNTAESRRLKRTARRRYTRRRNRILYLQEIFTESMNEIDESFFHRLDDSFLVPEDKRGSKYPIFATLQEEKEYHKQFPTIYHLRKQLADSKEKSDVRLIYLALAHMIKYRGHFLYEETFDIKNNDIQKIFNEFINIYDNTFEGSSLSGQNAQVEAIFTDKISKSAKRERVLKLFPDEKSTGLFSEFLKLIVGNQADFKKHFDLEEKAPLQFSKDTYDEELENLLGQIGDDFADLFLIAKKLYDAILLSGILTVTDPSTKAPLSASMIERYENHQKDLAALKQFIKNNLPEKYVEVFSDQSKDGYAGYIDGKTTQEAFYKYIKNLLSKFEGADYFLDKIEREDFLRKQRTFDNGSIPHQIHLQEMNAILRRQGEHYPFLKENREKIEKILTFRIPYYVGPLARDNRDFSWLTRNSDEPIRPWNFEEVVDKARSAEDFIHRMTNYDLYLPEEKVLPKHSLLYETFAVYNELTKVKFIAEGLRDYQFLDSGQKKQIVNQLFKEKRKVTEKDIIHYLHNVDGYDGIELKGIEKQFNANLSTYHDLLKITKDKEFMDDPKNEEILENIVHTLTIFEDREMIKQRLAQYDTLFDEKVIKALTRRHYTGWGKLSAKLINGIRDKQSGKTILDYLIDDDKINRNFMQLINDDGLSFKEIIQKAQVVGKTDDVKQVVQELPGSPAIKKGILQSIKIVDELVKVMGYALESIVIEMARENQTTARGKKNSQQRYKRIEDALKNLAPGLDSNILKENPTDNIQLKNDRLFLYYLQNGKDMYTGKPLDINQLSSYDIDHIIPQAFIKDDSIDNRVLTSSKDNRGKSDNVPSLEVVQKRKAFWQQLLDSKLISERKFNNLTKAERGGLDERDKVGFIRRQLVETQQITKNVAQILDARFNTEVKEKNQKIRTVKIITLKSNLVSNFRKEFGLYKVREINNYHHAHDAYLNAVVAKAILKKYPKLEPEFVYGDYQKYDLKKYISRFKPSKEIEKATEKYFFYSNLLNFFKEEVLYADGTIRKRENIEYSKDTGEIAWDKEKDFATIKKVLSYPQVNIVKKREVQTGGFSKESILPKGNSDKLIPRKTKDILWDTTKYGGFDSPVIAYSILLIADIEKGKAKKLKTVKTLVGITIMEKAAFEENPITFLENKGYHNVRKENILCLPKYSLFELENGRRRLLASAKELQKGNEIVLPVCLTTLLYHSKNLHKLDEPEHLEYIQKHRNEFKDLLNLVSEFSQKYILAEANLEKIKDLYADNEQADIEILANSFINLLTFTALGAPAAFKFFGKDVDRKRYTTVSEILNATLIHQSITGLYETRIDLSKLGEE

SEQ ID NO: 764 - protein, 1421 aa, Streptococcus sanguinis
MTKFNKNYSIGLDIGVSSVGYAVVTEDYRVPAFKFKVLGNTEKEKIKKNLIGSTTFVSAQPAKGTRVFRVNRRRIDRRNHRITYLRDIFQKEIEKVDKNFYRRLDESFRVLGDKSEDLQIKQPFFGDKELETAYHKKYPTIYHLRKHLADADKNSPVADIREVYMAISHILKYRGHFLTLDKINPNNINMQNSWIDFIESCQEVFDLEISDESKNIADIFKSSENRQEKVKKILPYFQQELLKKDKSIFKQLLQLLFGLKTKFKDCFELEEEPDLNFSKENYDENLENFLGSLEEDFSDVFAKLKVLRDTILLSGMLTYTGATHARFSATMVERYEEHRKDLQRFKFFIKQNLSEQDYLDIFGRKTQNGFDVDKETKGYVGYITNKMVLTNPQKQKTIQQNFYDYISGKITGIEGAEYFLNKISDGTFLRKLRTSDNGAIPNQIHAYELEKIIERQGKDYPFLLENKDKLLSILTFKIPYYVGPLAKGSNSRFAWIKRATSSDILDDNDEDTRNGKIRPWNYQKLINMDETRDAFITNLIGNDIILLNEKVLPKRSLIYEEVMLQNELTRVKYKDKYGKAHFFDSELRQNIINGLFKNNSKRVNAKSLIKYLSDNHKDLNAIEIVSGVEKGKSFNSTLKTYNDLKTIFSEELLDSEIYQKELEEIIKVITVFDDKKSIKNYLTKFFGHLEILDEEKINQLSKLRYSGWGRYSAKLLLDIRDEDTGFNLLQFLRNDEENRNLTKLISDNTLSFEPKIKDIQSKSTIEDDIFDEIKKLAGSPAIKRGILNSIKIVDELVQIIGYPPHNIVIEMARENMTTEEGQKKAKTRKTKLESALKNIENSLLENGKVPHSDEQLQSEKLYLYYLQNGKDMYTLDKTGSPAPLYLDQLDQYEVDHIIPYSFLPIDSIDNKVLTHRENNQQKLNNIPDKETVANMKPFWEKLYNAKLISQTKYQRLTTSERTPDGVLTESMKAGFIERQLVETRQIIKHVARILDNRFSDTKIITLKSQLITNFRNTFHIAKIRELNDYHHAHDAYLAVVVGQTLLKVYPKLAPELIYGHHAHFNRHEENKATLRKHLYSNIMRFFNNPDSKVSKDIWDCNRDLPIIKDVIYNSQINFVKRTMIKKGAFYNQNPVGKFNKQLAANNRYPLKTKALCLDTSIYGGYGPMNSALSIIIIAERFNEKKGKIETVKEFHDIFIIDYEKFNNNPFQFLNDTSENGFLKKNNINRVLGFYRIPKYSLMQKIDGTRMLFESKSNLHKATQFKLTKTQNELFFHMKRLLTKSNLMDLKSKSAIKESQNFILKHKEEFDNISNQLSAFSQKMLGNTTSLKNLIKGYNERKIKEIDIRDETIKYFYDNFIKMFSFVKSGAPKDINDFFDNKCTVARMRPKPDKKLLNATLIHQSITGLYETRIDLSKLGED

SEQ ID NO: 765 - protein, 317 aa, Streptococcus sp.
FEDSILFSYQVDSKFNRKISDATIYATRKAKLDKEKSEETYVLGKIKDIYSQAGYDAFIKIYNKDKSKFLMYHKDPQTFEKVIEEILRTYPSKELNDKNKEIPCNPFEKYRQENGPIRKYSKKSNGPEIKSLKYYDNKLGNHIDITPESSDNQVVLQSLKPWRTDVYFNHQTKKYELMGLKYSDLSFEKGSGKYSISNQKYNSIKRIEGIDEQSEFKFTLYKNDLILIKDSENNEQKLFRFNSRNDTAKHYIELKPYDKAKFDGEQELITILGNVAKGGRCLKGLNKSNISIFKVKTDVLGKKHIIKKEGDEPKLKF

SEQ ID NO: 766 - protein, 1420 aa, Streptococcus sp.
MAKFNKNYSIGLDIGVSSVGYAVVTEDYRVPAFKFKVLGNTEKEKIKKNLIGSTTFVPAQSAQGTRVFRVNRRRIDRRNHRIAYLRDIFQKEIEKIDKNFYRRLDESFRVLGDKSEDIQIKQPFFGNKELETAYHKKYPTIYHLRKHLADADKNSPVADIREVYMVLSHILKYRGHFLTLGKIDPNNINMQNSWIDFIESCQDAFDLEISDESKTIAAIFKSSENRQEKVKQILSYFQQELLKKDKSIFKQLLQLLFGLKTKFKDCFELEEEPDLNFSKENYDENLENLLGALEEDFSDVFAKLKILRDTILLSSMLTYTGATHARFSATMVERYEEHRKDLQRFKSFVKQNLSEQDYLDIFGRKTPTGFDVDKETKGYVGYISNKMVLTNPQKQKTIQQNFYDYISGKITGIEGAECFLNKISDGTFLRKLRTTDNGAIPNQIHAYELEKIIERQGRDYPFLLENKDKLLSILTFKIPYYVGPLAKGNNSRFAWIKRTTSQDVLDDNDEDTRNGKIRPWNYHKLINMDETRDAFIINLIGNDIILLNEKVLPKRSLIYEEVMLQNELTRVKYKDKYGKIHFFNSELRQEIINNLFKTNSKRVSSAMLLSYLENFTNLQAVEIVSGIEKGKSLNSTLKTYNDLKTIFSEELLDSEIYQKELEEIIKVITVFDDKKSIKNYLTKYFGHLEFLNEEKINQLSKLRYTGWGRYSGKLLLGIRDEDTGFNLMQFLRNDDENRNLTQLISDTTLSFDSAIKAIQSKSTVEDDVFEEIKNLAGSPAIKRGILNSIKIVDELVQIIGYPPQNIIIEMARENMTTEEGQKKAKTRKSKLESALKNIEDSVLESGKVPHSDEQLQSEKLYLYYLQNGKDMYSLDKTGSPTPLYRDQLDQYEVDHIIPYSFLPIDSIDNKVLTHRENNQRKLNNIPDKETVANMKPFWEKLYNAKLISQTKYQRLTTSERTPDGVLTESMKAGFIERQLVETRQIIKHVARILDNRFSDTKIITLKSQLVTNFRNTFHIAKIRELNDYHHAHDAYLAVVVGQTLLKAYPKLAPELIYGHHAHFNRHEENKATLRKHLYSNIMRFFNNPDSKVSKDIWDCNRDLPIVKDVIYNSQINFVKRTMIKKGAFYNQNPVGKLNKQIAANNRYPLKTKVSSLDTSIYGGYGPMNSALSIIIIAERFNEKKGKIETVKEFHDIFIIDYEKFNNNPFQFLNNVSEEGFLKKNDLNRVLAFYRISKYSLMQKIDGTRMLFESKSNLHKVTQFKLTKTQNELFFHMKRLLTKSNLMDLKSESAIKESQNFIQTHQNEFDNIADRLSNYSQKMLGETKSLQTLINGYNERPIKQIDNNEETIRYYYDNFIKMFSFVKSGAPKDIINFFNDKYTVPRMRPKPDRKMLDATLIHQSITGLYETRIDLSKLGED

SEQ ID NO: 767 - protein, 1371 aa, Streptococcus sp.
MENKNYSIGLDIGTNSVGWSVITDDYKVPSKKMKVLGNTDKHFIKKNLIGALLFDEGTTAEARRLKRTARRRYTRRKNRLRYLQEIFSEEIGKVDSSFFHRLDDSFLIPEDKRGSKYPIFATLAEEKKYHKQFPTIYHLRKQLADSKEKTDLRLIYLALAHMIKYRGHFLYEEAFDIKNNDIQKIFNEFISIYNNTFEGNSLSGQNVQVEAIFTDKISKSAKRERVLKLFPDEKSTGLFSEFLKLIVGNQADFKKHFDLEEKAPLQFSRDTYDEDLENLLGQIGDDFADLFLVAKKLYDAILLSGILTVTNPSTKAPLSASMIERYENHQKDLASLKQFIKNNLPEKYDEVFSDQSEDGYAGYIDGKTTQETFYKYIKNLLSKFEGADYFLDKIEREDFLRKQRTFDNGSIPHQIHLQEMNAILRRQGEHYPFLKENKEKIEKILTFRIPYYVGPLARGNRDFAWLTRNSDQAIRPWNFEEIVDKASSAEDFINKMTNYDLYLPEEKVLPKHSLLYETFAVYNELTKVKFIAEGLRDYQFLDSGQKKQIVTQLFKEKRKVTEKDIIQFLHNVDGYDGIELKGIEKQFNASLSTYHDLLKIIKDKAFMDDAKNEAILENIVHTLTIFEDREMIKQRLAQYDSLFDEKVIKALTRRHYTGWGKLSAKLINGISDKQTGNTILDYLIDDGEINRNFMQLINDDGLSFKEIIQKAQVVGKTNDVKQVVQELPGSPAIKKGILQSIKIVDELVKVMGHAPESIVIEMARENQTTARGKKNSQQRYKRIEDSLKILASGLNSKILKEHPTDNIQLQNDRLFLYYLQNGKDMYTGEALDINQLSSCDIDHIIPQAFIKDDSLDNRVLTSSKDNRGKSDNVPSLEVVDKMKVFWQQLLDSKLISYRKFNNLTKAERGGLNELDKVGFIKRQLVETRQITKHVAQILDARFNKEVTEKDKKNRTVKIITLKSNLVSNFRKEFELYKVREINDYHHAHDAYLNAVVAKAILKKYPKLEPEFVYGDYQKYDLKRYISRSKDPKEIEKATEKYFFYSNLLNFFKEEVHYADGTIVKRENIEYSKDTGEIAWNKEKDFATIKKVLSLPQVNIVKKREVQTGGFSKESILPKGNSDKLIPRKTKDILWDTTKYGGFDSPVIAYSILLIADIEKGKAKKLKTVKTLVGITIMEKDAFEKNPIAFLENKGYHNVCKENILCLPKYSLFELENGRRRLLASAKELQKCNEIVLPVYLTTLLYHSKNVHKLDEPGHLEYIQKHRNEFKDLLNLVSEFSQKYVLADANLEKIKNLYADNEQADIEILANSFINLLTFTALGAPAAFKFFGKDVDRKRYTTVSEILNATLIHQSITGLYETRIDLSKLGED

SEQ ID NO: 768 - protein, 93 aa, Streptococcus sp.
MILIKDSENNEQKLFRFNSRNDTAKHYVELKPYDKARFDGQQELITILGNVAKGGQCLKGLNKSNISIFKVKTDVLGKKHIIKKEGDEPKLKF

SEQ ID NO: 769 - protein, 1121 aa, Streptococcus sp.
MNGLVLGLDIGIASVGVGILEKNSGKIIHANSRLFPAATADNNVERRKNRQARRLHRRKKHRGVRFQDLFEDYGLLTDFSKVSINLNPYRLRVDGLNQQLTNEELFIALKNIVKRRGISYLDDASEDGGTVSSDYGKAVEENRKLLAEQTPGQIQLERFEKYGQVRGDFTVVENGEKRRLINVFSTSAYRKEAERILRKQQEFNSKITDEFIEDCLKILTGKRKYYHGPGNEKSRTDYGRFRTDGTTLDNIFGILIGKCTFYPDEYRASKASYTAQEFNLLNDLNNLTVPTETKKLSEEQKKVIVEYAKEAKTLGASTLLKYIAKMIDASVDQIRGYRVDVNNKPEIHTFEAYRKMQSLETISVGELSRNVLDELAHILTLNTEREGIEEAINTKLKDSFSQDQVLELVQFRKNNSSLFSKGWHNFSLKLMMELIPELYETSEEQMTILTRLGKQKSKEISKRTKYIDEKELTEEIYNPVVAKSVRQAIKIINEATKKHGIFDNIVIEMARENNEEDAKKDYIKRQKANQDEKNAAMEKAAFQYNGKKELPDSIFHGQKELATKIRLWHQQGEKCLYTGKNIPISDLIHNQYKYEIDHILPLSLSFDDSLSNKVLVLATANQEKGQRTPFQALDSMDDAWSYREFKSYVKESKLLGNKKKEYLLTEEDISKIEVKQKFIERNLIDTRYSSRVVLNALQDFYKAHKFDTTISVVRGQFTSQLRRKWGLEKSRETYHHHAVDALIIAASSQLRLWKKQNNPLIAYKEGQFVDSETGEIISLSDDEYKELVFKAPYDHFVDTLSSKTFEDSILFSYQVDSKFNRKISDATIYATRKAKLDKEKSEETYVLGKIKDIYSQAGYDAFIKIYNKDKSKFLMYHKDPQTFEKVIEEILRTYPSKELNDKNKEIPCNPFEKYRQENGPIRKYSKKSNGPEIKSLKYYDNKLGNHIDITPESSDNQVVLQSLKPWRTDVYFNHQTKKYELMGLKYSDLSFEKGSGKYSISNQKYNSIKRIEGIDEQSEFKFTLYKNDLILIKDSENNEQKLFRFNSRNDTAKHYIELKPYDKAKFDGEQELITILGNVAKGGRCLKGLNKSNISIFKVKTDVLGKKHIIKKEGDEPKLKF

SEQ ID NO: 770 - protein, 1026 aa, Streptococcus sp.
MNGLVLGLDIGIASVGVGILEKNSGKIIHANSRLFPAATADNNVERRKNRQARRLNRRKKHRGVRFQDLFEDYGLLTDFSKVSINLNPYRLRVDGLNQQLTNEELFIALKNIVKRRGISYLDDASEDGGAVSSDYGKAVEENRKLLAEQTPGQIQLERFEKYGQVRGDFTVVENGEKRRLINVFSTSAYRKEAEKILRKQQEFNNQITDEFIEDYLKILTGKRKYYHGPGNEKSRTDYGRFRTDGTTLDNIFGVLIGKCTFYPNEYRASKSSYTAQEFNLLNDLNNLTVPTETKKLSEEQKKVIVEYAKEAKTLGASTLLKYIVKMIDASVDQISGYRVDVNNKPEMHTFEVYRKMQSLETISVGELSRNVLDELAHILTLNTEREGIEEAINSKLMGVFSQDQVLELVQFRKNNSSLFSKGWHNFSLKLMMELIPELYETSEEQMTILTRLGKQKSKETSKRTKYIDEKELTEEIYNPVVAKSVRQAIKIINEATKKHGIFDNIVIEMARENNEEDAKKDYIKRQKANQDEKNAAMEKAAFQYNGKKELPGNIFNGHKELATKIRLWHQQGEKCLYTGKTIPISDLIHNQYKYEIDHILPLSLSFDDSLSNKVLVHATANQEKGQRTPFQALDSMDDAWSYREFKSYVKDLKSLSNKKKDYLLTEEDISKIEVKQKFIERNLVDTRYSSRVVLNALQDFYKSHQFDTTISVVRGQFTSQLRRKWGLEKSRETYHHHAVDALIIAASSQLRLWKKQNNPLITYKEGQFIDSQTGEIISLTDDEYKELVFKAPYDHFVDTLHSKTFEDGILFSYQVDSKYNRKISDATIYATRKAKLDKDKSEETYVLGKIKDIYSQAGYDAFIKIYNKDKRKFLMYHKDPQTFEKVIEEILRTYPSKERNDKNKEVPCNPFEKYRQENGPIRKYSKKGNGPEIKCLKYYDNKLGNYIDISPDGSDNQVVLQSLKPWRTDVYFNHQTKKYELMGLKYSDLSFEKGSGKYSISNEKYNSIKRIEGVNEQSEFKFTLYK

SEQ ID NO: 771 - protein, 1377 aa, Streptococcus sp.
MNNKPYSIGLDIGTNSVGWSVITDDYKVPSKKMKVLGNTDKRFIKKNLIGALLFDEGTTAEARRLKRTARRRYTRRKNRLRYLQEIFAEEMSKVDSSFFHRLDDSFLIPEDKRGSKYPIFATLVEEKEYHKQFPTIYHLRKQLADSKEKADLRLIYLVLAHMIKYRGHFLYEEAFDIKNNDIQKIFNEFISIYDNTFEGSSLSGQNAQVETIFTDKISKSAKRERVLKLFPDEKSTGLFSEFLKLIVGNQADFKKHFDLEEKAPLQFSKDTYDEDLENLLEQIGDDFADLFVAAKKLYDAILLSGILTVTDPSTKAPLSASMIERYENHQKDLAVLKQFIKTNLPEKYVEVFSDQSKDGYAGYIDGKTTQEAFYKYIKNLLSKFDGADYFLDKIEREVFLRKQRTFDNGSIPHQIHLQEMNTILRRQGEHYPFLKENKEKIEKILTFRIPYHVGPLARGNRDFAWLTRNSDQAIRPWNFEEIVDKASSAEDFINKMTNYDLYLPEEKVLPKHSLLYETFAVYNELTKVKFIAEGMRDYQFLDSGQKKKIINQLFKKKRKVTEDDIIDCLQKIDNYDGIELKGIEKQFNASLSTYHDILKIIRDKEFMDDPKNGDILENVIHTLTIFEDREMIKQRLAQYNSIFDEKVIKALSRKHYTGWGKLSAKLIDGIRDKQTGKTILDYLMDDGKSNRNFMQLIKDDELSFTEIIQKAQVVGDTDNLRQVVQNLPGSPAIKKGILQSIKIVDELVKVMGHAPESIVIEMARENQTTARGKKNSQQRYKRIEDSLKNLASGLDSNILKENPTDNIQLQNDRLFLYYLQNGKDMYTGEALNINQLSSYDIDHIIPQAFIKDDSLDNRVLTSSKDNRGKSDNVPSLEVVEKMKAFWQQLLDSKLISERKYNNLTKAERERGGLNELDKVGFIKRQLVETRQITKHVAQILDARFNKEVTEKNKKNRNVKIITLKSNMVSNFRKEFGLYKVREINDYHHAHDAYLNAVVAKAILKKYPKLEPEFVYGDYQKYDLKRYISRSKDPKEVEKATEKYFFYSNLLNFFKEEVHYADGTIVKRENIEYSKDTGEIAWNKEKDFATIKKVLSLPQVNIVKKTEEQTVGQNGGLFDNNIVSKKKVVDASKLIPIKSGLSPEKYGGYARPTIAYSVLVTYKQNNKIKNTMVGIPVLTKLEFERDPNLYLRNLGINNVSHVIKLVKYTVLEFKHKYGTYRRFIVSNQELKRANQIFVTTKQMKLISQYTTLDKNEHDSLLKNNQQLIQSIWNQFLEFMLATDLVNKKQYDELILTNNQTIEECRNIMNRVITTLSFTNINAGQKKIIFDDTLSLPIKRWQFTDSDKMVKKIIESTLIHQSITGLYETRIDLSKLGED

SEQ ID NO: 772 - protein, 1371 aa, Streptococcus sp.
MNNNNYSIGLDIGTNSVGWAVITDDYKVPSKKMRVLGNTDKRFIKKNLIGALLFDEGTTAEDRRLKRTARRRYTRRKNRLRYLQEIFAEEMSKVDSSFFHRLDDSFLVPEDKSGSKYPIFATLAEEKEYHKKFPTIYHLRKHLADSKEKADLRLIYLALAHITKYRGHFLYEEAFDIKNNDIQKIFNEFINIYDNTFEGSSLSGQNAQVEAIFTGKISKSVKREHVLKLFPDEKSTGLFSEFLKLIVGNQADFKKHFDLEEKASLQFSKDTYDEDLENLLGQIGDDFADLFLVAKKLYDAILLSGILTVTDPSTKAPLSASMIERYENHQEDLAALKQFIKNNLPEKYAEVFSDQSKDGYAGYIDGKTTQEAFYKYIKNLLSKFEGADYFLDKIEREDFLRKQRTFDNGSIPHQIHLQEMNAILRRQGEHYPLLKENKEKIEKILTFRIPYYVGPLARGNRDFAWLTRNSDQAIRPWNFEEIVDKASSAESFINKMTNYDLYLPEEKVLPKHSLLYETFAVYNELTKVKFIAEGLRDYQFFDSGQKKQIVNQLFKEKRKVTEKDIIHYLHNVDGYDGIELKGIEKQFNASLSTYHDLLKIIKDKEFMDNHKNQEILENIVHTLTIFEDREMIKQRLAQYDSIFDEKVIKALTRRHYTGWGKLSAKLINGICDKKTGKTILDYLIDDGYNNRNFMQLINDDGLSFKEIIQKAQVVGKTDDLTQVVRELSGSPAIKKGILQSIKIVDELVKIMGYAPESIVIEMARENQTTAKGKKNSQQRYKRIEDALKNLAPGLDSTISKENPTDNIQLQNDRLFLYYLQNGKDMYTGEALDINQLSSYDIDHIIPQAFIKDDSLDNRVLTSSKDNRGKSDNVPSLEVVKKRKAFWQQLLDSKLISERKFNNLTKAERGGLDERDKVGFIKRQLVETRQITKHVARILDARFNTEVSEKNQKIRSVKIITLKSNLVSNFRKEFKLYKVREINDYHHAHDAYLNAVVAKAILKKYPKLEPEFVYGDYQKYDLKRYISKSKDPKEVEKATEKYFFYSNLLNFFKEEVHYADGTIVKRENIEYSKDTGEIAWNKEKDFVTIKKVLSYPQVNIVKKREVQTGGFSKESILPKGNSDKLIPRKTKDILWDTTKYGGFDSPVIAYSILLIADIEKGKAKKLKTVKTLVGITIMEKAAFEKNPITFLENKGYHNVRKENILCLPKYSLFELENGRRRLLASAKELQKGNEIVLPVYLTTLLYHSKNVHKLDEPEHLEYIQKHRYEFKDLLNLVSEFSQKYVLAEANLEKIKSLYVDNEQADIEILANSFINLLTFTALGAPAAFKFFGKDVDRKRYTTVSEILNATLIHQSITGLYETRIDLSKLGED

SEQ ID NO: 773 - protein, 1139 aa, Streptococcus sp.
MSDLVLGLDIGIGSVGVGILNKVTGEIIHKNSRIFPAAQAENNLERRTNRQGRRLTRRKKHRRVRLNHLFEESGLITDFTKVSINLNPYQLRVKGLTAELSNEELFIALKNMVKHRGISYLDDASDDGNSSVGDYAQIVKENSKQLETKTPGQIQLERYQKYGQLRGDFTVEEDGRKHRLINVFPTSAYHAEALRILQTQQEFNPQITDEFINSYLEILTGKRKYYHGPGNEKSRTDYGKYTTKKDAQGQYITLNNIFGILIGKCTFYPEEYRAAKASYTAQEFNLLNDLNNLTVPTETKKLSEEQKYQIITYVKNEKAMGPAKLFKYIAKLLSCDVADIKGYRIDKSDKAEIHTFEAYRKMKTLETLDVKKMAREELDKLAYVLTLNTEREGIQEALDHEFADGTFSQEQVDELVQFRKANSSIFGKGWHSFSVKLMMELIPELYATSEEQMTILTRLGKQKTTSSSNKTKYIDEKQLTEEIYNPVVAKSVRQAIKIVNAAIKKYGDFDNIVIEMARETNEDDEKKAIQKIQKANKAEKDAAMRKAANQYNGKAELPHSVFHGHKQLATKIRLWHQQGERCLYTGKTISIHDLINNPNQFEIDHILPLSITFDDSLANKVLVYATANQEKGQRTPYQALDSMDDAWSFRELKAFVRESKALSNKKKEYLLTEEDISKFDVRKKFIERNLVDTRYASRVVLNALQEHFRTHKIDTKVSVVRGQFTSQLRRHWGIEKTRDTYHHHAVDALIIAASSQLNLWKKQKNTLVSYSEDQLLDIETGELISDDEYKESVFKAPYQHFVDTLKSKEFEDSILFSYQVDSKFNRKISDATIYATRKAKLDKEKKEYTYTLGKIKDIYALGTKTPSKTGFYKFLDLYKKDKSQFLMYQKDRRTWDEVIEKILEQYRPFKEKDKNGKEVDFNPFEKYRIENGPIRKYSRKGNGPEIKSLKYYDNLLGRFVDITPSESKNPVALLSLNPWRTDVYYNTETRKYEFLGLKYADLCFEKGGSYGISKVKYNKIREKEGIGKNSEFKFTLYKNDLILIKDTETNRQQIFRFWSRTGKDNPKSFEKHKLELKPYEKTRFEKGEELKVLGKVPPSSNRLQKNMQIENLSIYKVRTDVLGNQHIIKNEGDKPKLDF

SEQ ID NO: 774 - protein, 1375 aa, Streptococcus sp.
MSNKSYSIGLDIGTNSVGWAVITDDYKVPSKKMKVLGNTDKHFIKKNLIGALLFDEGTTAEDRRLKRTARRRYTRRKNRLRYLQEIFSQEISKVDSSFFHRLDDFFLVPEDKRGSKYPIFATLVEEKEYHKKFPTIYHLRKHLADSKEKTDLRLIYLALAHMIKYRGHFLYEESFDIKNNDIQKIFSEFISIYDNTFEGKSLSGQNAQVEAIFTDKISKSTKRERVLKLFPDEKSTGLFSEFLKLIVGNQADFKKHFDLEEKAPLQFSKDTYDEDLENLLGQIGDDFADLFLVAKKLYDAILLSGILTVKDLSTKAPLSASMIERYENHQKDLAALKQFIQNNLQEKYDEVFSDQSKDGYAGYIDGKTTQEAFYKYIKNLLSKFEGADYFLDKIEREDFLKKQRTFDNGSIPHQIHLQEMNAIIRRQGEHYPFLQENKEKIEKILTFRIPYYVGPLARGNGDFAWLTRNSDQAIRPWNFEEIVDQASSAEDFINKMTNYDLYLPEEKVLPKHSLLYETFAVYNELTKVKFIAEGLTRYQFLDKKQKKDIFDTFFKAENKRKVTEKDIIHYLHNVDGYDGIELKGIEKQFNASLSTYHDLLKIIKDKAFMDDSKNEEILENIIHTLTIFEDREMIKQRLAQYDSLFDEKVIKALTRRHYTGWGKLSAKLINGIRDKKSGKTILDYLIDDGEINRNFMQLIHDDGLSFKEIIQKAQVFGKTNDVKQVVQELPGSPAIKKGILQSIKIVDELVKVMGHAPESIVIEMARENQTTARGKKNSQQRYKRIEDSLKNLASGLDSNILKENPTDNIQLQNDRLFLYYLQNGRDMYTGKPLEINQLSNYDIDHIIPQAFIKDDSLDNRVLTSSKDNRGKSDNVPSLEVVEKMKAFWQQLLDSKLISERKFNNLTKAERERGGLNELDKVGFIKRQLVETRQITKHVAQFLDARFNKEVTEKDKKNRNVKIITLKSNLVSNFRKEFGLYKVREINDYHHAHDAYLNAVLAKAILKKYPKLEPEFVYGDYQKYDLQRYISKSREPKEVEKATQKYFFYSNLLNFFKEEVHYADGTIVKRENIEYSKDTGEIAWNKEKDFATVKKVLSLPQVNIVKKTEVQTGGFSKESILPKGNSDKLIPRKTKEILWDTTKYGGFDSPVIAYSILLIADIEKGKAKKLKTVKTLVGITIMEKATFEKNPITFLENKGYHNVRKENILCLPKYSLFELESGRRRMLASAKELQKGNEIVLPVYLTTLLYHSKNVHKLDEPEHLEYIQKHRYEFKDLLNLVSEFSQKYVLADANLEKIKNLYADNEQADIEILANSFINLLTFTALGAPAAFKFLGKDVDRKRYTTVSEILNATLIHQSITGLYETRIDLSKLGED

SEQ ID NO: 775 - protein, 206 aa, Streptococcus sp.
RTPFQALDSMDDAWSYREFKSYVKESKLLGNKKKEYLLTEEDISKIEVKQKFIERNLIDTRYSSRVVLNALQDFYKAHKFDTTISVVRGQFTSQLRRKWGLEKSRETYHHHAVDALIIAASSQLRLWKKQNNPLIAYKEGQFVDSETGEIISLSDDEYKELVFKAPYDHFVDTLSSKTFEDSILFSYQVDSKFNRKISDATIYATR

SEQ ID NO: 776 - protein, 1122 aa, Streptococcus suis
MSNGKILGLDIGIASVGVGVIDAQTGEIIHASSRIFPSANAANNAERRTFRGSRRLIRRKKHRIKRLDDLFNDFHINLDGEMSTDNPYVLRVKGLSQKLTVEELYISIKNIMKRRGISYLDDAESDNEAGRSDYAKAIERNRQLLTSKTPGEIQLERLEKYGQLRGNFTIIDEEGQSQQIINVFSTSDYVKEVEKILDCQKMYHKFISDEFCDKLIELLREKRKYYVGPGNEKSRTDYGIYRTDGTTLENLFGILIGKCTFYPDQYRSSRASYTAQEFNFLNDLNNLTVPTETKKLSQEQKEFLVNYAKETSVLGAGKILQQIAKLADCKVEDIRGYRLDNKDKPELHTFETYRAMKGLVPLVDIGVLSREQLDILADILTLNTDFEGIREALKKQLPNVFDEKQVKGLASFRKSKSQLFAKGWHNLSQKIMLEVIPELYATSDEQMTILTRLGKFEKSSVAEYPSSINVDEITDEIYNPVVAKSIRQTIKIINASIKKWDEFDQIVIEMPRDRNEDEEKKRIADGQKANAKEKADSILRAAELYCAGKVLPDYVYNGHNQLATKIRLWYQQGERCIYTGQPISIHDLIHNQNQYEIDHILPLSLTFDDSLSNKVLVLATANQEKAQRTPYNYLKSATSAWSYREFKDYVTKRKGIGKKKCEYLTFEEDINGFEVRSKFIQRNLVDTRYASKVILNALQDYFKISGIQTKVSVVRGQFTSQLRHKWGIEKTRETYHHHAVDALIIAASSQLRLWKKQESPLVVDYQEGRQVDLETGEILELTDEQYKELVYQPPYQGFVNTISSSAFDNEILFSYQVDSKVNRKISDATIYATRNAQLGKDKTEGIYVLGKIKDIYTQAGYEAFLKRYTKDKTSFLMYHKDLDTWEKVIEIILRDYREYDEKGKEIGNPFERYRRENGYVKKYSRKGNGTAIKSLKYYDNKLGNHIDITPENSRNAVVLQSLKPWRTDVYFNKETGKYEFLGIKYSDLSFEKGTGEYGISQEKYDSIKIAEGVAKKSIFKFTLYKQDLLFIKDIENNFGKLLRFTSKNDTSKHYVELKPYDKNKFGTEEPLLPVLGNVAKSGQCIKGLNKSNISIYKVRTDILGYRHFIKQEGEHPQLKFKK

SEQ ID NO: 777 - protein, 1381 aa, Streptococcus suis
MVKKKYAIGIDIGTNSVGWSIVTDDYKVPSKKMKVFGNTEKRYIKKNLLGTLLFDEGNTAENRRLKRTARRRYTRRRNRILYLQEIFAEEINKIDDSFFQRLDDSFLIVEDKQGSKHPIFGTLQEEKEYHKQFPTIYHLRKQLADSSQKADIRLIYLALAHIIKYRGHFLFEGDLKSENKDVQHLFNDFVEMFDKTVEGSYLSENLPNVADVLVEKVSKSRRLENILHYFPNEKKNGLFGNFLALALGLQPNFKTNFELAEDAKIQFSKETYEEDLEELLGKIGDDYADLFIATKSLYDGILLAGILSTTDSTTKAPLSSSMVNRYEEHQKDLALLKNFIHQNLSDSYKEVFNDKLKDGYAGYIEGKTTQENFYRFIKKAIEKIEGSNYFIDKIDREDFLRKQRTFDNGSIPHQIHLQEMHAIIRRQAEFYPFLVENQDKIEKILTFRIPYYVGPLARGKSEFAWLNRKSDEKIRPWNFDEMVDKETSAENFITRMTNYDRYLPDQKVLPKHSLLYEKFAVYNELTKVKFIAEGMRDYQFLDSGQKKDIVKTLFKTKRKVTAKDIKAYLENSNGYAGVELKGLEEQFNASLPTYHDLLKILRDKAFIDAEENQEILEDIVLTLTLFEDREMIRKRLEKYKDILTEEQRKKLERRHYTGWGRLSAKLINGILDKVTRKTILGYLIDDGTSNRNFMQLINDDTLSFVDEIRLAQGSGEAEDYRAEVQNLAGSPAIKKGILQSLKIVDELIEVMGYEPEHIVVEMARENQFTNQGRRNSQQRINRLENALKDFGSKILEEQKPYGVSKVNNIHLQSDRLFLYYLQNGKDMYTDEELDIDHLSEYDIDHIIPQAFIKDDSLDNKVLTKSAKNRGKSDDVPSMEIVHNRKNFWRQLLKSKLISQRKFDNLTKAERGGLTNEDKARFIQRQLVETRQITKHVARMLDTRFNTKLDEAGNRIRDPKVNIITLKSNLVSQFRKDYQLYKIREINNYHHAHDAYINAVVATALLKKYPQLAPEFVYGEYPTYNSYNSRKSATEKVLFYSNIMNFFKRIVVHSKTGEVRIRPVIEVNKETGEIVWDKKSDFRTVRKVLSYPQVNVVKKTEVQNHGLDRGKPKGFYNANLSPRPKEGSVENLVPAKQSFDTKRYGGYAGISNSYAVLVNGIIEKGKKKSKAEVTEFQGISILARKDFDKNPKQYLLNLGYKDIKSIIKLPKYSLFELENGSRRMLASILSTNNKRGEIHKGNEMYLPDKFVTLLYHAMRVNRTLEPGHKKYVETHRHVFDELLIYILEYNEKIVGAKANGKRIVEAYSARKDTDNLEELCNSFINLLNLTALGSAVDFEFLGTKIPRYRDYTPSSLLKATLIHQSVTGLYETRIDLSKLGGD

SEQ ID NO: 778 - protein, 39 aa, Streptococcus thermophilus
GRCIKGLGKSNISIYKVRTDVLGNQHIIKNEGDKPKLDF

SEQ ID NO: 779 - protein, 302 aa, Streptococcus thermophilus
MIRRKKHRIVRLNRLFEESGLITDFTKISINLNPYQLRVKGLTDELSNEELFIALKNMVKHRGISYLDDASDDGNSSVGDYAQIVKENSKQLETKTPGQIQLERYQTYGQLRGDFTVEKDGKKHRLINVFPTSAYRSEALRILQTQQEFNPQITDEFINRYLEILTGKRKYYHGPGNEKSRTDYGRYRTSGETLDNIFGILIGKCTFYPDEFRAAKASYTAQEFNLLNDLNNLTVPTETKKLSKEQKNQIINYVKNEKAMGPAKLFKYIAKLLSCDVADIKGYRIDKSGKAERFILSKPIEK

SEQ ID NO: 780 - protein, 1121 aa, Streptococcus thermophilus
MSDLVLGLDIGIGSVGVGILNKVTGEIIHKNSRIFPAAQAENNLVRRTNRQGRRLTRRKKHRIVRLNRLFEESGLITDFTKISINLNPYQLRVKGLTDELSNEELFIALKNMVKHRGISYLDDASDDGNSSVGDYAQIVKENSKQLETKTPGQIQLERYQTYGQLRGDFTVEKDGKKHRLINVFPTSAYRSEALRILQTQQEFNPQITDEFINRYLEILTGKRKYYHGPGNEKSRTDYGRYRTSGETLDNIFGILIGKCTFYPDEFRAAKASYTAQEFNLLNDLNNLTVPTETKKLSKEQKNQIINYVKNEKAMGPAKLFKYIAKLLSCDVADIKGYRIDKSGKAEIHTFEAYRKMKTLETLDIEQMDRETLDKLAYVLTLNTEREGIQEALEHEFADGSFSQKQVDELVQFRKANSSIFGKGWHNFSVKLMMELIPELYETSEEQMTILTRLGKQKTTSSSNKTKYIDEKLLTEEIYNPVVAKSVRQAIKIVNAAIKEYGDFDNIVIEMARETNEDDEKKAIQKIQKANKDEKDAAMLKAANQYNGKAELPHSVFHGHKQLATKIRLWHQQGERCLYTGKTISIHDLINNSNQFEVDHILPLSITFDDSLANKVLVYATANQEKGQRTPYQALDSMDDAWSFRELKAFVRESKTLSNKKKEYLLTEEDISKFDVRKKFIERNLVDTRYASRVVLNALQEHFRAHKIDTKVSVVRGQFTSQLRRHWGIEKTRDTYHHHAVDALIIAASSQLNLWKKQKNTLVSYSEDQLLDIETGELISDDEYKESVFKAPYQHFVDTLKSKEFEDSILFSYQVDSKFNRKISDATIYATRQAKVGKDKADETYVLGKIKDIYTQDGYDAFMKIYKKDKSKFLMYRHDPQTFEKVIEPILENYPNKQMNEKGKEVPCNPFLKYKEEHGYIRKYSKKGNGPEIKSLKYYDSKLGNHIDITPKDSNNKVVLQSVSPWRADIYFNNTTGKYEILGLKYADLQFEKGTGTYKISQEKYNDIKKKEGVDSDSEFKFTLYKNDLLLVKETETKEQQLFRFLSRTMPKQKHYVELKPYDKQKFEGGEALIKVLGNVANGGQCIKGLGKSNISIYKVRTDVLGNQHIIKNEGDKPKLDF

SEQ ID NO: 781 - protein, 1121 aa, Streptococcus thermophilus
MSDLVLGLDIGIGSVGVGILNKVTGEIIHKNSRIFPAAQAENNLVRRTNRQGRRLTRRKKHRIVRLNRLFEESGLITDFTKISINLNPYQLRVKGLTDELSNEELFIALKNMVKHRGISYLDDASDDGNSSVGDYAQIVKENSKQLETKTPGQIQLERYQTYGQLRGDFTVEKDGKKHRLINVFPTSAYRSEALRILQTQQEFNPQITDEFINRYLEILTGKRKYYHGPGNEKSRTDYGRYRTSGETLDNIFGILIGKCTFYPDEFRAAKASYTAQEFNLLNDLNNLTVPTETKKLSKEQKNQIINYVKNEKAMGPAKLFKYIAKLLSCDVADIKEYRIDKSGKAEIHTFEAYRKMKTLETLDIEQMDRETLDKLAYVLTLNTEREGIQEALEHEFADGSFSQKQVDELVQFRKANSSIFGKGWHNFSVKLMMELIPELYETSEEQMTILTRLGKQKTTSSSNKTKYIDEKLLTEEIYNPVVAKSVRQAIKIVNAAIKEYGDFDNIVIEMARETNEDDEKKAIQKIQKANKDEKDAAMLKAANQYNGKAELPHSVFHGHKQLATKIRLWHQQGERCLYTGKTISIHDLINNSNQFEVDHILPLSITFDDSLANKVLVYATANQEKGQRTPYQALDSMDDAWSFRELKAFVRESKTLSNKKKEYLLTEEDISKFDVRKKFIERNLVDTRYASRVVLNALQEHFRAHKIDTKVSVVRGQFTSQLRRHWGIEKTRDTYHHHAVDALIIAASIQLNLWKKQKNTLVSYSEDQLLDIETGELISDDEYKESVFKAPYQHFVDTLKSKEFEDSILFSYQVDSKFNRKISDATIYATRQAKVGKDKADETYVLGKIKDIYTQDGYDAFMKIYKKDKSKFLMYRHDPQTFEKVIEPILENYPNKQINEKGKEVPVNPFLKYKEEHGYIRKYSKKGNGPEIKSLKYYDSKLGNHIDITPKDSNNKVVLQSVSPWRADVYFNKTTGKYEILGLKYADLQFEKGTGTYKISQEKYNDIKKKEGVDSDSEFKFTLYKNDLLLVKDTETKEQQLFRFLSRTMPKQKHYVELKPYDKQKFEGGEALIKVLGNVANSGQCKKGLGKSNISIYKVRTDVLGNQHIIKNEGDKPKLDF

SEQ ID NO: 782 - protein, 1121 aa, Streptococcus thermophilus
MSDLVLGLDIGIGSVGVGILNKVTGEIIHKNSRIFPAAQAENNLVRRTNRQGRRLTRRKKHRRVRLNRLFEESGLITDFTKISINLNPYQLRVKGLTDELSNEELFIALKNMVKHRGISYLDDASDDGNSSVGDYAQIVKENSKQLETKTPGQIQLERYQTYGQLRGDFTVEKDGKKHRLINVFPTSAYRSEALRILQTQQEFNPQITDEFVNRYLEILTGKRKYYHGPGNEKSRTDYGRYRTNGETLDNIFGILIGKCTFYPEEFRAAKASYTAQEFNLLNDLNNLTVPTETKKLSKEQKNQIINYVKNEKAMGPAKLFKYIAKLLSCDVADIKGYRIDKSGKAEIHTFEAYRKMKTLETLDIEQMDRETLDKLAYVLTLNTEREGIQEALEHEFADGSFSQKQVDELVQFRKANSSIFGKGWHNFSVKLMMELIPELYETSEEQMTILKRLGKQKTTSSSNKTKYIDEKLLTEEIYNPVVAKSIRQAIKIVNAAIKEYGDFDNIVIEMARETNEDDEKKAIQKIQKANKDEKDAAMLKAANQYNGKAELPHSVFHGHKQLATKIRLWHQQGERCLYTGKTISIHDLINNPNQFEVDHILPLSITFDDSLANKVLVYATANQEKGQRTPYQALDSMDDAWSFRELKAFVRESKTLSNKKKEYLLTEEDISKFDVRKKFIERNLVDTRYASRVVLNALQEHFRAHKIDTKVSVVRGQFTSQLRRHWGIEKTRDTYHHHAVDALIIAASSQLNLWKKQKNTLVSYSEDQLLDIETGELISDDEYKESVFKAPYQHFVDTLKSKEFEDSILFSYQVDSKFNRKISDATIYATRQAKVGKDKKDETYVLGKIKDIYTQDGYDAFMKIYKKDKSKFLMYRHDPQTFEKVIEPILENYPNKEMNEKGKEVPCNPFLKYKEEHGYIRKYSKKGNDPEIKSLKYYDSKLGNHIDITPKDSNNKVVLQSVSPWRADVYFNKTTGKYEILGLKYADLQFEKGTGTYKISQEKYNDIKKKEGVDSDSEFKFTLYKNDLLLVKDTETKEQQLFRFLSRTMPKQKHYVELKPYDKQKFEGGEALIKVLGNVANSGQCKKGLGKSNISIYKVRTDVLGNQHIIKNEGDKPKLDF

SEQ ID NO: 783 - protein, 1122 aa, Streptococcus thermophilus
MSDLVLGLDIGIGSVGVGILNKVTGEIIHKNSRIFPAAQAENNVERRTNRQGRRLTRRKKHRRVRLNRLFEESGLITDFTKISINLNPYQLRVRGLTDELSNEELFIALKNMVKHRGISYLDDASDDGNSSVGDYAQIVKENSKQLETKTPGQIQLERYQTYGQLRGDFTVEKDGKKHRLINVFPTSAYRSEALRILQTQQEFNSQITDEFINRYLEILTGKRKYYHGPGNEKSRTDYGRYRTSGETLDNIFGILIGKCTFYPEEFRAAKASYTAQEFNLLNDLNNLTVPTETKKLSKEQKNQIINYVKNEKAMGPAKLFKYIAKLLSCDVADIKGYRIDKSGKAEIHTFEAYRKMKTLETLDIEQMDRETLDKLAYVLTLNTEREGIQEALEHEFADGSFSQKQVDELVQFRKASSSIFGKGWHNFSVKLMMELIPELYETSEEQMTILTRLGKQKTTSSSNKTKYIDEKLLTEEIYNPVVAKSVRQAIKIVNAAIKEYGDFDNIVIEMARETNEDDEKKAIQKIQKANKDEKDAAMLKAANQYNGKAELPHSVFHGHKQLATKIRLWHQQGERCLYTGKTISIHDLINNPNQFEVDHILPLSITFDDSLANKVLVYATANQEKGQRTPYQALDSMDDAWSFRELKAFVRESKTLSNKKKEYLLTEEDISKFDVRKKFIERNLVDTRYASRVVLNALQEHFRAHKIDTKVSVVRGQFTSQLRRHWGIEKTRDTYHHHAVDALIIAASSQLNLWKKQKNTLVSYSEDQLLDIETGELISDDEYKESVFKAPYQHFVDTLKSKEFEDSILFSYQVDSKFNRKLSDATIYATRQAKVGKDKKDETYVLGKIKDIYTQDGYDAFMKIYKKDKSKFLMYRHDPQTFEKVIEPILENYPNKEMNEKGKEVPCNPFLKYKEEHGYIRKYSKKGNGPEIKSLKYYDSKLLGNPIDITPENSKNKVVLQSLKPWRADVYFNKTTGKYEILGLKYADLQFEKKTGTYKISQEKYNGIMKEEGVDSDSEFKFTLYKNDLLLVKDTETKEQQLFRFLSRTMPNVKYYVELKPYSKDKFEKNESLIEILGSADKSGRCIKGLGKSNISIYKVRTDVLGNQHIIKNEGDKPKLDF

SEQ ID NO: 784 - protein, 1388 aa, Streptococcus thermophilus
MTKPYSIGLDIGTNSVGWAVITDNYKVPSKKMKVLGNTSKKYIKKNLLGVLLFDSGITAEGRRLKRTARRRYTRRRNRILYLQEIFSTEMATLDDAFFQRLDDSFLVPDDKRDSKYPIFGNLVEEKAYHDEFPTIYHLRKYLADSTKKADLRLVYLALAHMIKYRGHFLIEGEFNSKNNDIQKNFQDFLDTYNAIFESDLSLENSKQLEEIVKDKISKLEKKDRILKLFPGEKNSGIFSEFLKLIVGNQADFRKCFNLDEKASLHFSKESYDEDLETLLGYIGDDYSDVFLKAKKLYDAILLSGFLTVTDNETEAPLSSAMIKRYNEHKEDLALLKEYIRNISLKTYNEVFKDDTKNGYAGYIDGKTNQEDFYVYLKNLLAEFEGADYFLEKIDREDFLRKQRTFDNGSIPYQIHLQEMRAILDKQAKFYPFLAKNKERIEKILTFRIPYYVGPLARGNSDFAWSIRKRNEKITPWNFEDVIDKESSAEAFINRMTSFDLYLPEEKVLPKHSLLYETFNVYNELTKVRFIAESMRDYQFLDSKQKKDIVRLYFKDKRKVTDKDIIEYLHAIYGYDGIELKGIEKQFNSSLSTYHDLLNIINDKEFLDDSSNEAIIEEIIHTLTIFEDREMIKQRLSKFENIFDKSVLKKLSRRHYTGWGKLSAKLINGIRDEKSGNTILDYLIDDGISNRNFMQLIHDDALSFKKKIQKAQIIGDEDKGNIKEVVKSLPGSPAIKKGILQSIKIVDELVKVMGGRKPESIVVEMARENQYTNQGKSNSQQRLKRLEKSLKELGSKILKENIPAKLSKIDNNALQNDRLYLYYLQNGKDMYTGDDLDIDRLSNYDIDHIIPQAFLKDNSIDNKVLVSSASNRGKSDDFPSLEVVKKRKTFWYQLLKSKLISQRKFDNLTKAERGGLLPEDKAGFIQRQLVETRQITKHVARLLDEKFNNKKDENNRAVRTVKIITLKSTLVSQFRKDFELYKVCEINDFHHAHDAYLNAVIASALLKKYPKLEPEFVYGDYPKYNSFRERKSATEKVYFYSNIMNIFKKSISLADGRVIERPLIEVNEETGESVWNKESDLATVRRVLSYPQVNVVKKVEEQNHGLDRGKPKGLFNANLSSKPKPNSNENLVGAKEYLDPKKYGGYAGISNSFAVLVKGTIEKGAKKKITNVLEFQGISILDRINYRKDKLNFLLEKGYKDIELIIELPKYSLFELSDGSRRMLASILSTNNKRGEIHKGNQIFLSQKFVKLLYHAKRISNTINENHRKYVENHKKEFEELFYYILEFNENYVGAKKNGKLLNSAFQSWQNHSIDELCSSFIGPTGSERKGLFELTSRGSAADFEFLGVKIPRYRDYTPSSLLKDATLIHQSVTGLYETRIDLAKLGEG

SEQ ID NO: 785 - protein, 1388 aa, Streptococcus thermophilus
MTKPYSIGLDIGTNSVGWAVITDNYKVPSKKMKVLGNTSKKYIKKNLLGVLLFDSGITAEGRRLKRTARRRYTRRRNRILYLQEIFSTEMATLDDAFFQRLDDSFLVPDDKRDSKYPIFGNLVEEKAYHDEFPTIYHLRKYLADSTKKADLRLVYLALAHMIKYRGHFLIEGEFNSKNNDIQKNFQDFLDTYNAIFESDLSLENSKQLEEIVKDKISKLEKKDRILKLFPGEKNSGIFSEFLKLIVGNQADFRKCFNLDEKASLHFSKESYDEDLETLLGYIGDDYSDVFLKAKKLYDAILLSGFLTVTDNETEAPLSSAMIKRYNEHKEDLALLKEYIRNISLKTYNEVFKDDTKNGYAGYIDGKTNQEDFYVYLKNLLAEFEGADYFLEKIDREDFLRKQRTFDNGSIPYQIHLQEMRAILDKQAKFYPFLAKNKERIEKILTFRIPYYVGPLARGNSDFAWSIRKRNEKITPWNFEDVIDKESSAEAFINRMTSFDLYLPEEKVLPKHSLLYETFNVYNELTKVRFIAESMRDYQFLDSKQKKDIVRLYFKDKRKVTDKDIIEYLHAIYGYDGIELKGIEKQFNSSLSTYHDLLNIINDKEFLDDSSNEAIIEEIIHTLTIFEDREMIKQRLSKFENIFDKSVLKKLSRRHYTGWGKLSAKLINGIRDEKSGNTILDYLIDDGISNRNFMQLIHDDALSFKKKIQKAQIIGDEDKGNIKEVVKSLPGSPAIKKGILQSIKIVDELVKVMGGRKPESIVVEMARENQYTNQGKSNSQQRLKRLEKSLKELGSKILKENIPAKLSKIDNNALQNDRLYLYYLQNGKDMYTGDDLDIDRLSNYDIDHIIPQAFLKDNSIDNKVLVSSASNRGKSDDFPSLEVVKKRKTFWYQLLKSKLISQRKFDNLTKAERGGLLPEDKAGFIQRQLVETRQITKHVARLLDEKFNNKKDENNRAVRTVKIITLKSTLVSQFRKDFELYKVREINDFHHAHDAYLNAVIASALLKKYPKLEPEFVYGDYPKYNSFRERKSATEKVYFYSNIMNIFKKSISLADGRVIERPLIEVNEETGESVWNKESDLATVRRVLSYPQVNVVKKVEEQNHGLDRGKPKGLFNANLSSKPKPNSNENLVGAKEYLDPKKYGGYAGISNSFAVLVKGTIEKGAKKKITNVLEFQGISILDRINYRKDKLNFLLEKGYKDIELIIELPKYSLFELSDGSRRMLASILSTNNKRGEIHKGNQIFLSQKFVKLLYHAKRISNTINENHRKYVENHKKEFEELFYYILEFNENYVGAKKNGKLLNSAFQSWQNHSIDELCSSFIGPTGSERKGLFELTSRGSAADFEFLGVKIPRYRDYTPSSLLKDATLIHQSVTGLYETRIDLAKLGEG

SEQ ID NO: 786 - protein, 595 aa, Streptococcus thermophilus
MVQFRKANSSIFGKGWHNFSVKLMMELIPELYETSEEQMTILKRLGKQKTTSSSNKTKYIDEKLLTEEIYNPVVAKSVRQAIKIVNAAIKEYGDFDNIVIEMARETNEDDEKKAIQKIQKANKDEKDAAMLKAANQYNGKAELPHSVFHGHKQLATKIRLWHQQGERCLYTGKTISIHDLINNPNQFEVDHILPLSITFDDSLANKVLVYATANQEKGQRTPYQALDSMDDAWSFRELKAFVRESKTLSNKKKEYLLTEEDISKFDVRKKFIERNLVDTRYASRVVLNALQEHFRAHKIDTKVSVVRGQFTSQLRRHWGIEKTRDTYHHHAVDALIIAASSQLNLWKKQKNTLVSYSEDQFLDIETGELISDDEYKESVFKAPYQHFVDTLKSKEFEDSILFSYQVDSKFNRKISDATIYATRKAKLDKEKKEYTYTLGKIKDIYTQAGYDAFIKIYKKDKSKFLMYHHDPQTFEKVIEPILENYPNKEINEKGKEVPCNPFLKYKEEHGYIRKYSKKGNGPEIKSFKYYDNLLGRHIDITPKNSKNIVALRKLNPWRTDVYFNHETMKYEFLGLKYADISYKKSKNKAGDFLPK

SEQ ID NO: 787 - protein, 1388 aa, Streptococcus thermophilus]
MTKPYSIGLDIGTNSVGWAVITDNYKVPSKKMKVLGNTSKKYIKKNLLGVLLFDSGITAEGRRLKRTARRRYTRRRNRILYLQEIFSTEMATLDDAFFQRLDDSFLVPDDKRDSKYPIFGNLVEEKVYHDEFPTIYHLRKYLADSTKKADLRLVYLALAHMIKYRGHFLIEGEFNSKNNDIQKNFQDFLDTYNAIFESDLSLENSKQLEEIVKDKISKLEKKDRILKLFPGEKNSGIFSEFLKLIVGNQADFRKCFNLDEKASLHFSKESYDEDLETLLGYIGDDYSDVFLKAKKLYDAILLSGFLTVTDNETEAPLSSAMIKRYNEHKEDLALLKEYIRNISLKTYNEVFKDDTKNGYAGYIDGKTNQEDFYVYLKNLLAEFEGADYFLEKIDREDFLRKQRTFDNGSIPYQIHLQEMRAILDKQAKFYPFLAKNKERIEKILTFRIPYYVGPLARGNSDFAWSIRKRNEKITPWNFEDVIDKESSAEAFINRMTSFDLYLPEEKVLPKHSLLYETFNVYNELTKVRFIAESMRDYQFLDSKQKKDIVRLYFKDKRKVTDKDIIEYLHAIYGYDGIELKGIEKQFNSSLSTYHDLLNIINDKEFLDDSSNEAIIEEIIHTLTIFEDREMIKQRLSKFENIFDKSVLKKLSRRHYTGWGKLSAKLINGIRDEKSGNTILDYLIDDGISNRNFMQLIHDDALSFKKKIQKAQIIGDEDKGNIKEVVKSLPGSPAIKKGILQSIKIVDELVKVMGGRKPESIVVEMARENQYTNQGKSNSQQRLKRLEKSLKELGSKILKENIPAKLSKIDNNALQNDRLYLYYLQNGKDMYTGDDLDIDRLSNYDIDHIIPQAFLKDNSIDNKVLVSSASNRGKSDDFPSLEVVKKRKTFWYQLLKSKLISQRKFDNLTKAERGGLLPEDKAGFIQRQLVETRQITKHVARLLDEKFNNKKDENNRAVRTVKIITLKSTLVSQFRKDFELYKVREINDFHHAHDAYLNAVIASALLKKYPKLEPEFVYGDYPKYNSFRERKSATEKVYFYSNIMNIFKKSISLADGRVIERPLIEVNEETGESVWNKESDLATVRRVLSYPQVNVVKKVEEQNHGLDRGKPKGLFNANLSSKPKPNSNENLVGAKEYLDPKKYGGYAGISNSFAVLVKGTIEKGAKKKITNVLEFQGISILDRINYRKDKLNFLLEKGYKDIELIIELPKYSLFELSDGSRRMLASILSTNNKRGEIHKGNQIFLSQKFVKLLYHAKRISNTINENHRKYVENHKKEFEELFYYILEFNENYVGAKKNGKLLNSAFQSWQNHSIDELCSSFIGPTGSERKGLFELTSRGSAADFEFLGVKIPRYRDYTPSSLLKDATLIHQSVTGLYETRIDLAKLGEG

SEQ ID NO: 788 - protein, 1038 aa, Streptococcus vestibularis
MIDELSNEELFIALKNMVKHRGISYLDDASDDGNSSVGDYAQIVKENSKQLETKTPGQIQLERYQKYGQLRGDFTVEEDGKKHRLINVFPTSAYRAEALRILQTQQEFNSQITDEFINRYLEILTGKRKYYHGPGNEKSRTDYGRYRTSGETLDNIFGILIGKCTFYPEEFRAAKASYTAQEFNLLNDLNNLTVPTETKKLSEEQKNQIINYVKNEKAMGPAKLFKYIAKLLSCDIADIKGYRIDKSDKAEIHTFEAYRKMKTLETIDIEKMSREELDKLAYVLTLNTEREGIQEALEHEFVDGNFSQEQIDELVQFRKANSSIFGKGWHNFSVKLMMELIPELYATSEEQMTILTRLGKQKTTSSSNKTKYIDEKLLTEEIYNPVVAKSVRQAIKIVNAAIKEYGDFDNIVIEMARATNEDDEKKAIQKIQKANKDEKDAAMLKAANQYNGKAELPHSVFHGHKQLATKIRLWHQQGERCLYTGKTISIHDLINNPNQFEIDHILPLSITFDDSLANKVLVYATANQEKGQRTPYQALDSMDDAWSFRELKAFVRESKTLSNKKKEYLLTEEDISKFDVRKKFIERNLVDTRYASRVVLNALQEHFRAHKIDTKVSVVRGQFTSQLRRHWGIEKTRDTYHHHAVDALIIAASSQLNLWKKQKNTLVNYSENQLLDIETGELISDDEYKESVFKAPYQHFVDTLKSKEFEDSILFSYQVDSKFNRKISDATIYATRKAKLDKEKKEYTYTLGKIKDIYALGTKTPSKTGFYKFLDLYKKNKSQFLMYQKDRKTWDEVIEKILEQYRPFKEKDKNGKEVDFNPFEKYRIENGPIRKYSRKGNGPEIKSLKYYDNLLGRFVDITPSESKNPVALLSLNPWRTDVYYNTETRKYEFLGLKYADLCFEKGGSYGISKVKYNKIREKEGIGKNSEFKFTLYKNDLILIKDTETNRQQVFRFWSRTGKDNPKRFEKHKIELKPYEKARFEKGEELEVLGKVPPSSNQLQKNMQIENLSIFKVRTDVLGNQHIIKNEGDKPKLDF

SEQ ID NO: 789 - protein, 97 aa, Streptococcus vestibularis
MSDLVLGLDIGIGSVGVGILNKVTGEIIHKNSRIFPAAQAENNVERRTNRQGRRLTRRKKHRRVRLNHLFEESGLITDFTKVSINLNPYQLRVKIDR

SEQ ID NO: 790 - protein, 1084 aa, Subdoligranulum sp.
MKNTLYGIGLDIGVASVGWAVVGLNGTGEPVGLHRLGVRIFDKAEQPKTGESLAAPRRMARGMRRRLRRKALRRADVYALLERSGLSTREELAQMFEAGGLEDIYALRTRALDEPVGKAEFSRILLHLAQRRGFKSNRRTASDGEDGRLLAAVNENRRRMAQGGWRTVGEMLYRHEAFALHKRNKADDYLSTVGRDMVAEEASILFERQRAMGCSWAAPELQAEYLSILLRQRSFDEGPGGNSPYGGNQVEKMVGRCTFEPDEPRAAKAAYSFEYFSLLQKLNHIRLAENGETRPLTQPQRQQLLSLAHKTPDISLARIRKELALPETVQFNGVRCRANETLEESEKKEKFACLPAYHKMRKALDGVVKGRISSLSISQRDAAATALSLYKNEDTLRAKLTEAGFQAPEIDALAGLTGFSKFGHLSLKACRKLIPHLEQGLTYDQACTAAGYDFKGHGAGERAFTLPAAAPEMEQITSPVVRRAVAQTIKVVNGIIREMDASPAWVRIELARELSKTFGERQEMDRSMRENAAQNERLMQELRDTFHLLSPTGQDLVKYRLWKEQDGVCAYSLRRLDVERLFEPGYVDVDHIVPYSLSFDDRRSNKVLVLSSENRQKGNRLPLQYLQGKRREDFIVWTNSSVHDYRKRQNLLREKLSGDEAEGFRQRNLQDTQHMARFLYNYISDHLAFAQSEALGKKRVFAVSGAVTSHLRKRWGLSKVRADGDLHHALDAAVVACTTDGMIRRISGYYGHIEGEYLQDADGAGSQHARTKERFPAPWPRFRDELIVRLSEQPAEPLLDINPEFYCEYGTEHIRPVFVSRMPRRKVTGPGHKETIKGAAAADEGLLTVRKALTELKLDKDGEIKDYYMPSSDTLLYEALKAQLRRFGGDGKKAFAEPFYKPKADGTPGPLVRKVKTTEKATLTVPVHGGAASNDTMVRVDVFLVPGDGYYWVPVYTADTLKPELPNRAVVQGKPYSEWKEMREEDFIFSLYPNDLVYVEHKSGLKFTLQNADSTLEKTRTQTSAFAYFVSGSISTASITIRTHDNAYGIPSLGVKTLKTFHKYQVDVLGNVFPVHKETRQKFR

SEQ ID NO: 791 - protein, 951 aa, Sutterella parvirubra
MPTVRPVFHSSASFDLGAKNTGLFLVNHPAGAAPSAEYAAAYTIVQPADGDGLNYSTTNRRAVRHRLRGGKRFKLARRLVLQVIDALRKLKPGLIRDEEMRRTVEALSSLLKRRGFTRIESEAQVDPTTLDSVDPAVFADHETLGGFFSLGIPISTQWDALSQNPGAVEQLFKALPSAKDFGKYVTEQFPEFAEQKKLYADAIKVLSSEAKSIVMQLGLGHHHRSKYFEMIAHDMLRDPRLQGVFELFGSEERFKTFICNVSNLQLRALRWYFDEPNPEVANQWNPEKFQVVWLRGLKYFHPDAERKADMKKLIDELTASKDILDALCTTDPRRTIPPYEDQNNRRPPFDQTLWLSAAELTRRYGDKWRIWSQKFERADRALSTGLDEILLYTDRRSRMFNRNQDPSVYADSYVLQRVLDRSSKLDRYALRALAAGYRTQELHEPLATLSDTLGTQHVETFLTFAAEYYEEVAAAKNGLWLDGPSRLLERADIHPPMKKKVLDLLLGNILDATPEIGRILRTVLWNRHVHEKSRSTPASLCRSIEAIRKDFGGEFRMRYDALDAKIRAAEDQKKKFKPTNAEEKDLFKAWNATKTMHAFLRDVLQLTPKQLERTASPYVFAQLHTLIDTERDGFTSTSLAAHLENHWRMRANAAGMAQCSRLPADAVRPFDGVLSKALDRQAFEAAKLAAQHLMSRKELTDTDIRYSIIIESNRFAFSASTAELKKNTLAKKNAEKGLNFELKRWQDKDSRIREASRGICAYTGAKLGDVVEYDHIIPRAFTTSAMGSVFNSEANLICVSRPGNQTKADKRYGLNKLHKTYLTAVFGTADVTTIAASIEDIVGKLASANRLRHFELLNEKEQDAVRHALFLDDESDARRIVLRELAAQNKSRVNGTQAWFVRAFMTKLLEITKDWRERTGNTLDIRSWKTDAEVASRLRSALNFHAEITLT

SEQ ID NO: 792 - protein, 406 aa, Sutterella parvirubra
SNLFREEVPYGDHFLPIIQMKNRIYIGYQLPKADGTGGNAVAVLGKDPLELLETLKPFLDREPQAFSDHPVTYKMINERAYELLTKCALTPDQTTELERTQAEVLRSLNYQTSRAAVLGRLVDDKNKFVAKDAVWKEKDFVISFKLSPKKSAFKASGQLELPAKSDWKALVDSPELAINWGQPADDTFSQRIERKVRMNSSHLEHTPKKRVVSLPVVDKPSGGFRIRRHNLDGSAVFQVHTVANNKYGGFSADSAGKVDWSTPVLCGHLQHANLVPLDPETASAEQLVRMSEWRVVETTSDIRLEVCPGTSGRRYVRVELPFTLLQEWLTAGKVADVPVSPLHLPGSIKLTDPKTFCAEAQKTLSIFAQPRATIFFEQLGDRVRFRFEASGGPATMNAAYNAAGRS

SEQ ID NO: 793 - protein, 389 aa, Sutterella wadsworthensis
MKACDLEEKTNHLQACVAIDLGARYTGTFSILHKSSHLPSKDDCRAATYVLPEDGGKMTYSQRNRTAVRHRIRGKKRFALARRMAMLIIREKLAAKSVTLTSSETRRLAEAVGSLLRRRGYNRLETETDNDLTVLENIEPEVFSEHEILGKYFYAGTDLAIQWETLSQDLSKISSLLAERLSEKDFKKYLTGLIPDDKNKIKHIISVFKMLIDEAESINMQCVLGHKHRTQYLSDIHADMHRDTRLSKAAEAFGGVDRLWRLLGNLSNLQLRAHRWYFNAPHLFDDQALEPARLQKTLVRAFKYLHCPQGVESRAQAELVKELEEADDIIDALCTIDPVRTIPPYENQQNRRPPFDQTLYLSPDLGVSGFLCLGRLFQGQPNEAALCFL

SEQ ID NO: 794 - protein, 976 aa, Tannerella sp.
MKKILGLDLGSNSIGWALVNEAENRDEASSIIKLGVRVNPLTVDEMQNFEKGKSITTNADRTLKRSMRRNLQRYKLRRDALIKLLKKVGFITDGTILSEQGNRTTFETYRLRAKAPDEEISLQELARVLLMINKKRGYKSSRKIKEKEAGTLIDGMEVAKKLYDEDLTPGQLCLQLLESGKKSLPDFYSSDLQEEFDRIWNFQKQFNPKAFCDTAKEEIKGKNKSQTWAILAKYFIWMEEMDVWNEKESKTERVEKECKLVGLKRTVKKEEQRKENYCWRVQALTEQLDLEKVAVVLQEINGQISTSSGYLGAISDRSKVLYFNRQTVGQYQMAELEKNPNTSLRNMVFYRQDYLDEFDKIWEKQAEFHKELTVELKKEIRDIIIFYQRRLKSQKGLIGFCEFENREIMVEKNGKMQAKVVGCKVIPRSHPLFQEFKIWQTLNNVEVFAGEKKCKRKRTDAFPGLFDGTEDTLMVEGWRYLYQEEKEILAKELSVKKSLKKEYILKLLFDNPQDLDMNFEQIEGNDTGNVLFSAYSKMIEKYGYEPLDFGKPTDKIIEQLQVIFADLGWNTDLLFVDLNKEGKDLEKQPYFKLWHLLYSFEGDNTPTGNGKLVEKLMELCHVGKECALELVNISFQNDYGSLSAKAIKKILPYLKEGNRYDVACGYAGYRHSKSSLTKEEIENKVLKDKLDILPKNSLRNPVVEKILNQMVNVINAIIDTYGKPDEIRVELARELKKSAKEREELTKAIAKSTREHEEIRKVLQEEFGMINVSRNDIIRYKLYKELKDNGYKTLYSNQDIPKEKVFSKEIDIEHIIPQARLFDDSLSNKTLEYKAINIEKGNKTAYDFVKEKYGEKGLQQYLNRCESLFKGHRTKLRKLKMGQENIPEGFIDRDLRNTQYIAKKALAMLNEICRRVVATTGSITDRLREDWQLVDVLKELRCFRYFKDTKMKANHNKNIFYTSIKVDVSDTSKILK

SEQ ID NO: 795 - protein, 1049 aa, Tistrella mobilis
MINERLTFGIDLGIGSCGWAVLRHADAAGEPGVIEGLGSWCFDVPETSKERIPTNQVRRSNRLLRRVIRRRRNRMAEIRRLFHAQGLLPSADEDALKRPRLDPWELRARGLDQCLSAEEFAVALGHIARHRGFRSSAKRKAANTSGEDSKMLSALLVTRERTARYRTVGEMFARDPEYSARRRNRDGIFDRTVARDDLIHEVGKLFEAQRARGSAFASPDLEADFNAIAFRQAEMQDSERLVGNCPFERDEKRAARWAPSFERFRLLTRLINLRIATAEGERRFTPEDLARVSAELGATAKLPVSRVRALIGLLPDERFTTIRVEDEDRDIVARTGEAAPGTWRLRKTLGEALWAEMQARPDQLDAIAHVLSFFEATAKIRSELDRLGLPAAVIEALDRGLEDGAFAKFKGAGHISAKACRNLLPHLQQGHRYDQACRLAGYDHAASTLSHTAQVVSKAGFNALVTELGESIANPIARKALTEGLKQIRAMCARWGLPGAIHIELAREVGNSIEKRRELESQRETTTKRRQTERDEIRGLLALEDVDDDTLLRYRLWKEQGGKCLYTGKDIHVRQLIATDNSVQVDHILPWSRFGDDSFNNKTLCLASANQRKRGQTPWEWFSLTGTPEAWEVFASRVETSKDLRGFKKRNLLLKNADEVAQRFRSRNLNDTRYAARLLAEAAKLFYPAGDRQEKDGRRRVLTRPGPLTAALRHAWGLESLKKADGKRVSDDRHHALDALAVAAISEREVQRLTRSFQEWEQQGLARPLRHVAPPWPGFRGDVLAAYAQAFVARPERRRARGKGHDASIRQVVGEGPEAQVFERRGLADLKEADLDRVKDPERNQAIIEAVRAWILAGRPADAPPRSPRGDVIVKLRTAPAKKIKPAVPVRGGTADRGDMVRIDVFTRPNRKGRDEWYLVPIYPHQVMNRKAWPHPPMRSVVAYKDEAGWTEIGAEHSFRFSLYPRSYVQLVKSNGDVIEGYLVSMDRSTGAFRVFVHNNPAEMAKGIGAKTLLNLRKFNVDRFGVRTEVKSEVRTWHGEVCTSPVPPD

SEQ ID NO: 796 - protein, 1395 aa, Treponema denticola
MKKEIKDYFLGLDVGTGSVGWAVTDTDYKLLKANRKDLWGMRCFETAETAEVRRLHRGARRRIERRKKRIKLLQELFSQEIAKIDEGFFQRMKESPFYAEDKTILQENALFNDKDFTDKTYHKAYPTINHLIKAWIENKVKPDPRLLYLACHNIIKKRGHFLFEGDFDSENQFDTSIQALFEYLREDMEVDIDADSQKVKEILKDSSLKNSEKQSRLNKILGLKPSDKQKKAITNLISGNKINFADLYDNPDLKDAEKNSISFSKDDFDALSDDLASILGDSFELLLKAKAVYNCSVLSKVIGDEQYLSFAKVKIYEKHKTDLTKLKAVIKKHFPNNYKKVFGYNQDNESKNNYSGYVGVCKTKNKKLVINNSVNQEDFYKFLKPILSAKSEIKEVNDILAEIETGNFLPKQISKSNAEIPYQLRKMELEKILSNAEKHFSFLKQKDEKGLSHSEKIIMLLTFKIPYYIGPINDNHKKSFPDRCWVVKKEKSPSGKTTPWNFFDHIDKEKTAEEFITSRTNFCTYLIGESVLPKNSLLYSEYTVLNEINNLQIIIDGKNICDTKLKQKIYEDLFKKYKKITQKQISTFIKHEGICNKTDEVIILGIDKECTSSLKSYIELKNIFGKQVDEISTKNMLEEIIRWATIYDEGEGKTILKTKIKAEYGKYCSDEQIKKILNLKFSGWGRLSRKFLETVTSEMPGFSEPVNIITAMRETQNNLMELLSSEFKFTENIKKINSGFEDAEKQFSYDGLVKPLFLSPSVKKMLWQTLKLVKEISHITQAPPKKIFIEMAKGAELEPARTKTRLKILQDLYSSCKNDADAFSSEIQYLSGKIENEDNLRLRSDKLYLYYTQLGKCMYCGKPIEIGHVFDTSNYDIDHIYPQSKIKDDSISNRVLVCSSCNKNKEDKYPLKSEIQSKQRGFWNFLQRNNFISLEKLNRLTRTTPISDDETAKFIARQLVETRQATKVAAKVLEKMFPETKIVYSKAETVSMFRNKFDIIKCREINDFHHAHDAYLNIVVGNVYNTKFTNNPWNFIKEKRDNPKIADTYNYYKVFDYDVKRNNITAWEKGKTIITVKDMLKRNTPIYTRQAACKKGGLFDQTIMKKGLGQHPLKKEGPFSNISKYGGYNKVSAAYYTLIEYEEKGNKIRSLETIPLYLVKDIQKDQDVLKSYLTDLLGKKEFKILVPKIKINSLLKINGFPCHITGKTNDSFLLRPAVQFCCSNDEVLYFKKIIRFSEIRSQREKIGKTISPYEDLSFRSYIKENLCKKTKNDEIGEKEFYDLLQKKNLEIYDMLLTKHKDTIYKKRPNSATIDILVKGKEKFKSLIIENQFEVILEILKLFSATRNVSELQHIGGSKYSGVAKIGNKISSLDNCILIYQSITGIFEKRIDLLKV

SEQ ID NO: 797 - protein, 769 aa, Treponema denticola
MKKEIKDYFLGLDVGTGSVGWAVTDTDYKLLKANRKDLWGMRCFETAETAEVRRLHRGARRRIERRKKRIKLLQELFSQEIAKIDEGFFQRMKESPFYAEDKTILQENALFNDKDFTDKTYHKAYPTINHLIKAWIENKVKPDPRLLYLACHNIIKKRGHFLFEGDFDSENQFDTSIQALFEYLREDMEVDIDADSQKVKEILKDSSLKNSEKQSRLNKILGLKPSDKQKKAITNLISGNKINFADLYDNPDLKDAEKNSISFSKDDFDALSDDLASILGDSFELLLKAKAVYNCSVLSKVIGDEQYLSFAKVKIYEKHKTDLTKLKAVIKKHFPNNYKKVFGYNQDNESKNNYSGYVGVCKTKNKKLVINNSVNQEDFYKFLKPILSAKSEIKEVNDILAEIETGNFLPKQISKSNAEIPYQLRKMELEKILSNAEKHFSFLKQKDEKGLSHSEKIIMLLTFKIPYYIGPINDNHKKSFPDRCWVVKKEKSPSGKTTPWNFFDHIDKEKTAEEFITSRTNFCTYLIGESVLPKNSLLYSEYTVLNEINNLQIIIDGKNICDTKLKQKIYEDLFKKYKKITQKQISTFIKHEGICNKTDEVIILGIDKECTSSLKSYIELKNIFGKQVDEISTKNMLEEIIRWATIYDEGEGKTILKTKIKAEYGKYCSDEQIKKILNLKFSGWGRLSRKFLETVTSEMPGFSEPVNIITAMRETQNNLMELLSSEFKFTENIKKINSGFEDAEKQFSYDGLVKPLFLSPSVKKCCGRL

SEQ ID NO: 798 - protein, 1395 aa, Treponema denticola
MKKEIKDYFLGLDVGTGSVGWAVTDTDYKLLKANRKDLWGMRCFETAETAEVRRLHRGARRRIERRKKRIKLLQELFSQEIAKIDEGFFQRMKESPFYAEDKTILQENALFNDKDFTDKTYHKAYPTINHLIKAWIENKVKPDPRLLYLACHNIIKKRGHFLFEGDFDSENQFDTSIQALFEYLREDMEVDIDADSQKVKEILKDSSLKNSEKQSRLNKILGLKPSDKQKKAITNLISGNKINFADLYDNPDLKDAEKNSISFSKDDFDALSDDLASILGDSFELLLKAKAVYNCSVLSKVIGDEQYLSFAKVKIYEKHKTDLTKLKAVIKKHFPNNYKKVFGYNQDNESKNNYSGYVGVCKTKNKKLVINNSVNQEDFYKFLKPILSAKSEIKEVNDILAEIETGNFLPKQISKSNAEIPYQLRKMELEKILSNAEKHFSFLKQKDEKGLSHSEKIIMLLTFKIPYYIGPINDNHKKSFPDRCWVVKKEKSPSGKTTPWNFFDHIDKEKTAEEFITSRTNFCTYLIGESVLPKNSLLYSEYTVLNEINNLQIIIDGKNICDTKLKQKIYEDLFKKYKKITQKQISTFIKHEGICNKTDEVIILGIDKECTSSLKSYIELKNIFGKQVDEISTKNMLEEIIRWATIYDEGEGKTILKTKIKAEYGKYCSDEQIKKILNLKFSGWGRLSRKFLETVTSEMPGFSEPVNIITAMRETQNNLMELLSSEFKFTENIKKINSGFEDAEKQFSYDGLVKPLFLSPSVKKMLWQTLKLVKEISHITQAPPKKIFIEMAKGAELEPARTKTRLKILQDLYSSCKNDADAFSSEIQYLSGKIENEDNLRLRSDKLYLYYTQLGKCMYCGKPIEIGHVFDTSNYDIDHIYPQSKIKDDSISNRVLVCSSCNKNKEDKYPLKSEIQSKQRGFWNFLQRNNFISLEKLNRLTRTTPISDDETAKFIARQLVETRQATKVAAKVLEKMFPETKIVYSKAETVSMFRNKFDIIKCREINDFHHAHDAYLNIVVGNVYNTKFTNNPWNFIKEKRDNPKIADTYNYYKVFDYDVKRNNITAWEKGKTIITVKDMLKRNTPIYTRQAACKKGELFNQTIMKKGLGQHPLKKEGPFSNISKYGGYNKVSAAYYTLIEYEEKVNKIRSLETIPLYLVKDIQKDQDVLKSYLTDLLGKKEIKILVPKIKINSLLKINGFPCHITGKTGDSFVLRPAVQFCCSNDEVLYFKKIIRFNEIRSQREKMGKTISPYEDLSFRSYIKENLCKKTKADEIGEKEFYDLLQKKNLEIYDMLLTKHKDTIYNKRPNSTTLGMLTKGRYEFINLKPKDQIIVMLEILKLFCTTREAIDLGLIKGKPAAGVATLGKKISNLDNCILIYQSITGIFEKRIDLLKV

SEQ ID NO: 799 - protein, 1395 aa, Treponema denticola
MKKEIKDYFLGLDVGTGSVGWAVTDTDYKLLKANRKDLWGMRCFETAETAEVRRLHRGARRRIERRKKRIKLLQELFSQEIAKIDEGFFQRMKESPFYAEDKTILQENTLFNDKDFTDKTYHKAYPTINHLIKAWIENKVKPDPRLLYLACHNIIKKRGHFLFEGDFDSENQFDTSIQALFEYLREDMEVDIDADSQKVKEILKDSSLKNSEKQSRLNKILGLKPSDKQKKAITNLISGNKINFADLYDNPDLKDAEKNSISFSKDDFDALSDDLASILGDSFELLLKAKAVYNCSVLSKVIGDEQYLSFAKVKIYEKHKTDLTKLKNVIKKHFPKDYKKVFGYNKNEKNNNNYSGYVGVCKTKSKKLIINNSVNQEDFYKFLKTILSAKSEIKEVNDILTEIETGTFLPKQISKSNAEIPYQLRKMELEKILSNAEKHFSFLKQKDEKGLSHSEKIIMLLTFKIPYYIGPINDNHKKSFPDRCWVIKKEKSPSGKTTPWNFFDHIDKDKTAEAFITSRTNFCTYLVGESVLPKSSLLYSEYTVLNEINNLQIIIDGKNICDIKLKQKIYEELFKKYKKITQKQISTFIKHEGICNKTDEVIILGIDKECTSSLKSYIELKNIFGKQVDEISTKNMLEEIIRWATIYDEGEGKTILKTKIKAEYGKYCSDEQIKKILNLKFSGWGRLSRKFLETVTSEMPGFSEPVNIITAMRETQNNLMELLSSEFKFTENIKKINSGFEDAEKQFSYNGLVKPLFLSPSVKKMLWQTLKLVKEISHITQAPPKKIFIEMAKGAELEPARTKTRLKILQDLYNNCKNDADAFSSEIKDLSGKIENEDNLRLRSDKLYLYYTQLGKCMYCGKPIEIGHVFDTSNYDIDHIYPQSKIKDDSISNRVLVCSSCNKNKEDKYPLKSEIQSKQRGFWNFLQRNNFISLEKLNRLTRTTPISDDETAKFIARQLVETRQATKVAAKVLEKMFPETKIVYSKAETVSMFRNKFDIIKCREINDFHHAHDAYLNIVVGNVYNTKFTNNPWNFIKEKRDNPKIADTYNYYKVFDYDVKRNNITAWEKGKTIITVKDMLKRNTPIYTRQAACKKGGLFDQTIMKKGLGQHPLKKEGAFSNISKYGGYNKVSAAYYTLIEYEEKGNKIRSLETIPLYLVKDIQKDQDVLKSYLTDLLGKKEIKILVPKIKINSLLKINGFPCHITGKTGDSFVLRPAVQFCCSNDEVLYFKKIIRFNEIRSQREKMGKTISPYEDLSFRSYIKENLCKKTKADEIGEKEFYDLLQKKNLEIYDMLLTKHKDTIYNKRPNSTTLGMLTKGRYEFINLKPKDQIIVMLEILKLFCTTREAIDLGLIKGKPAAGVATLGKKISNPDNCILIYQSITGIFEKRIDLLKV

SEQ ID NO: 800 - protein, 1395 aa, Treponema denticola
MKKEIKDYFLGLDVGTGSVGWAVTDTDYKLLKANRKDLWGMRCFETAETAEVRRLHRGARRRIERRKKRIKLLQELFSQEIAKIDEGFFQRMKESPLYAEDKTILQENTLFNDKDFTDKTYHKAYPTINHLIKAWIENKVKPDPRLLYLACHNIIKKRGHFLFEGDFDSENQFDTSIQALFEYLREDMELDIDADSQKVKEILKDSSLKNSEKQSRLNKMLGLKPSDKQKKAITNLISGNKINFADLYDNPDLKDAEKNSISFSKDDFDALSDDLASILGDSFELLLKAKAVYNCSVLSKVIGDEQYLSFAKVKIYEKHKTDLTKLKNVIKKHFPKDYKKVFGYNKNEKNNNNYSAYVGVCKITHKKLVIKNSASQEDFYKFLKTILSAKSEIKEVNDILTEIETGTFLPKQISKSNAEIPYQLRKMELEKILSNAEKHFSFLKQKDEKGLSHSEKIIMLLTFKIPYYIGPINDNHKKSFPDRCWVVKKEKSPSGKTTPWNFFDHIDKEKTAEEFITSRTNFCTYLIGESVLPKSSLLYSEYTVLNEINNLQIIIDGKNICDIKLKQKIYEELFKKYKKITQKQISTFIKHEGICNKTDEVIILGIDKECTSSLKSYIELKNIFGKQVDEISTKNMLEEIIRWATIYDEGEGKTILKTKIKAEYGKYCSDEQIKKILNLKFSGWGRLSRKFLETVTSEMPGFSEPVNIITAMRETQNNLMELLSSEFKFTENIKKINSGFEDAEKQFSYNGLVKPLFLSPSVKKMLWQTLKLVKEISHITQAPPKKIFIEMAKGAELEPARTKTRLKILQDLYSSCKNDADAFSSEIQYLSGKIENEDNLRLRSDKLYLYYTQLGKCMYCGKPIEIGHVFDTSNYDIDHIYPQSKIKDDSISNRVLVCSSCNKNKEDKYPLKAEIQSKQRGFWNFLQRNNFISLEKLNRLTRTSPISDDETAKFIARQLVETRQATKVAAKVLEKMFPETKIVYSKAETVSMFRNKFDIIKCREINDFHHAHDAYLNIVVGNVYNTKFTNNPWNFIKEKRDNPKIADTYNYYKVFDYDVKRNNITAWEKGKTIITVKDMLKRNTPIYTRQAACKKGELFNQTIMKKGLGQHPLKKEGPLSNISKYGGYNKVSAAYYTLIEYEEKGSKIRSLETIPLYLVKDIQKNKDGLKSYLTDQIGKKEIKILIPKIKINSLLKINGFPCHITGKMGEAFVLRPAVQFCCSNDEALYFKKIIRFNEIRKQREKMGKTISPYEDLSFRSYIKDNLCKKTKADEIEEKEFYDLLQKKNLEIYDMLLTKHKDTIYKKRPNSATIDILVKGKEKFKSLIIENQFEVILEILKLFSATRNVSDLQHIGGSKNAGNARVGNKISSLDNCILIYQSITGIFEKRIDLLKI

SEQ ID NO: 801 - protein, 1395 aa, Treponema denticola
MKKEIKDYFLGLDVGTGSVGWAVTDTDYKLLKANRKDLWGMRCFETAETAEVRRLHRGARRRIERRKKRIKLLQELFSQEIAKIDEGFFQRMKESPLYAEDKTILQENTLFNDKDFTDKTYHKAYPTINHLIKAWIENKVKPDPRLLYLACHNIIKKRGHFLFEGDFDSENQFDTSIQALFEYLREDMEVDIDADSQKVKEILKDSSLKNSEKQSRLNKMLGLKPSDKQKKAITNLISGNKINFADLYDNPDLKDAEKNSISFSKDDFDALSDDLASILGDSFELLLKAKAVYNCSVLSKVIGDEQYLSFAKVKIYEKHKTDLTKLKNVIKKHFPKDYKKVFGYNKNEKNNNNYSGYVGVCKTKSKKLIINNSVNQEDFYKFLKTILSAKSEIKEVNDILTEIETGTFLPKQISKSNAEIPYQLRKMELEKILSNAEKHFSFLKQKDEKGLSHSEKIIMLLTFKIPYYIGPINDNHKKSFPDRCWVVKKEKSPSGKTTPWNFFDHIDKEKTAEEFITSRTNFCTYLIGESVLPKNSLLYSEYTVLNEINNLQIIIDGKNICDTKLKQKIYEELFKKYKKITQKQISTFIKHEGICNKTDEVIILGIDKECTSSLKSYIELKNIFGKQVDEISTKNMLEEIIRWATIYDEGEGKTILKTKIKAEYGKYCSDEQIKKILNLKFSGWGRLSRKFLETVTSEMPGFSEPVNIITAMRETQNNLMELLSSEFKFTENIKKINSGFEDVEKQFSYDGLVKPLFLSPSVKKMLWQTLKLVKEISHITQAPPKKIFIEMAKGAELDPVRTKTRLKILQDLYNNCKNDADAFSSEIKDLSGKIENEDNLRLRSDKLYLYYTQLGKCMYCGKPIEIGHVFDTSNYDIDHIYPQSKIKDDSISNRVLVCSSCNKNKEDKYPLKAEIQSKQRGFWNFLQRNNFISLEKFNRLTRATPISDDETAKFIARQLVETRQATKVAARVLEKMFPETKIVYSKAETVSMFRNKFDIVKCREINDFHHAHDAYLNIVVGNVYNTKFTNNLWNFIKEKRDNPKIADTYNYYKVFDYDVKRNNITAWEKGKTIITVKDMLKRNTPIYTRQAACKKGGLFDQTIMKKGLGQHPLKKEGPFSNISKYGGYNKVSAAYYTLIEYEEKGNKIRSLETIPLYLVKDIQKDQDVLKSYLTDLLGKKEFKILVPKIKINSLLKINGFPCHITGKTNDSFLLRPAVQFCCSNDEVLYFKKIIRFSEIRSQREKIGKTISPYEDLSFRSYIKENLCKKTKNDEIGEKEFYDLLQKKNLEIYDMLLTKHKDTIYKKRPNSATIDILVKGKEKFKSLIIENQFEVILEILKLFSATRNVSDLQHIGGSKYSGVAKIGNKISSLDNCILIYQSITGIFEKRIDLLKV

SEQ ID NO: 802 - protein, 357 aa, Treponema denticola
MKKEIKDYFLGLDVGTGSVGWAVTDTDYKLLKANRKDLWGMRCFETAETAEVRRLHRGARRRIERRKKRIKLLQELFSQEIAKTDEGFFQRMKESPFYAEDKTILQENALFNDRDFTDKTYHKAYPTINHLIKAWIENKVKPDPRLLYLACHNIIKKRGHFLFEGDFDSENQFDTSIQAFFEYLREDMEVDIDADSQKIKEILKDSSLKNSEKQSRLNKILGLKSSDKQKKAITNLISGNKINFADLYDNPDLKDAEKNSISFSKDDFDALSDDLASILGDSFELLLKAKAVYNCSVLSKVIGDEQYLSFAKVKIYEKHKTDLTKLKNVIKKHFPKDYKKVFGYNKNEKITTITPDM

SEQ ID NO: 803 - protein, 1395 aa, Treponema denticola
MKKEIKDYFLGLDVGTGSVGWAVTDTDYKLLKANRKDLWGMRCFETAETAEVRRLHRGARRRIERRKKRIKLLQELFSQEIAKTDEGFFQRMKESPFYAEDKTILQENALFNDRDFTDKTYHKAYPTINHLIKAWIENKVKPDPRLLYLACHNIIKKRGHFLFEGDFDSENQFDTSIQALFEYLREDMEVDIDADSQKVKEILKDSSLKNSEKQSRLNKMLGLKPSDKQKKAITNLISGNKINFADLYDNPDLKDAEKNSISFSKDDFDALSDDLASILGDSFELLLKAKAVYNCSVLSKVIGDEQYLSFAKVKIYEKHKTDLTKLKNVIKKHFPNDYKKVFGYNKNEKNNNNYSAYVGVCKTKSKKLVINNTVNQEDFYKFLKPILLAKSEIKEVNDILTEIETGTFLPKQISKSNAEIPYQLRKMELEKILSNAEKHFSFLKQKDEKGLSHSEKIIMLLTFKIPYYIGPINDNHKKSFPDRCWVIKKEKSPSGKTTPWNFFDHIDKDKTAEAFITSRTNFCTYLVGESVLPKNSLLYSEYTVLNEINNLQIIIDGKNICDIKLKQKIYEELFKKYKKITQKQISTFIKHEGICNKTDEVIILGIDKECTSSLKSYIELKNIFGKQVDEISTKNMLEEIIRWATIYDEGEGKTILKTKIKAEYGKYCSDEQIKKILNLKFSGWGRLSRKFLETVTSEMPGFSEPVNIITAMRETQNNLMELLSSEFKFTENIKKINSGFEDVEKQFSYDSLVKPLFLSPSVKKMLWQTLKLVKEISHITQAPPKKIFIEMAKGAELDPVRTKTRLKILQDLYNNCKNDADAFSSEIKDLSGKIENEDNLRLRSDKLYLYYTQLGKCMYCGKPIEIGHVFDTSNYDIDHIYPQSKIKDDSISNRVLVCSSCNKNKEDKYPLKAEIQSKQRGFWNFLQRNNFISLEKLNRLTRTSPISDDETAKFIARQLVETRQATKVAAKVLEKMFPETKIVYSKAETVSMFRNKFDIIKCREINDFHHAHDAYLNIVVGNVYNTKFTNNPWNFIKEKRDNPKIADTYNYYKVFDYDVKRNNITAWEKGKTIITVKDMLKRNTPIYTRQAACKKGELFNQTIMKKGLGQHPLKKEGPLSNISKYGGYNKVSAAYYTLIEYEEKGSKIRSLETIPLYLVKDIQKNKDGLKSYLTDQIGKKEIKILIPKIKINSLLKINGFPCHITGKMGEAFVLRPAVQFCCSNDEALYFKKIIRFNEIRKQREKMGKTISPYEDLSFRSYIKDNLCKKTKADEIEEKEFYDLLQKKNLEIYDMLLTKHKDTIYKKRPNSATIDILVKGKEKFKSLIIENQFEVILEILKLFSATRNVSDLQHIGGSKNAGNARVGNKISSLDNCILIYQSITGIFEKRIDLLKI

SEQ ID NO: 804 - protein, 631 aa, Treponema denticola
MLWQTLKLVKEISHITQAPPKKIFIEMAKGAELEPARTKTRLKILQDLYNNCKNDADAFSSEIKDLSGKIENEDNLRLRSDKLYLYYTQLGKCMYCGKPIEIGHVFDTSNYDIDHIYPQSKIKDDSISNRVLVCSSCNKNKEDKYPLRSEIQSKQRGFWNFLQRNNFISLEKLNRLTRTTPISDDETAKFIARQLVETRQATKVAAKVLEKMFPETKIVYSKAETVSMFRNKFDIVKCREINDFHHAHDAYLNIVVGNIYNTKFTNNPWNFIKEKRDNPKIADTYNYYKVFDYDVKRNNITAWEKGKTIITVKDMLKRNTPIYTRQAACKKGGLFDQTIMKKGLGQHPLKKEGPFSNISKYGGYNKVSAAYYTLIEYEEKENKIRSLETIPLYLVKDIQKSQEKLKSYLTDLLGKKEIKILVPKIKINSLLKINGFPCHITGKTNDSFLLRPAVQFCCSNDEVLYFKKIIRFNEIRSQREKMGKTISPYEDLSFRSYIKENLCKKTKNDEIGEKEFYDLLQKKNLEIYDMLLTKHKDTIYNKRPNSTTLGMLTKGRYEFINLKPKDQIIVMLEILKLFCTTREAIDLGLIKGKPAAGVATLGKKISNLDNCILIYQSITGIFEKRIDLLKV

SEQ ID NO: 805 - protein, 631 aa, Treponema denticola
MLWQTLKLVKEISHITQAPPKKIFIEMAKGAELEPARTKTRLKILQDLYSSCKNDADAFSSEIQYLSGKIENEDNLRLRSDKLYLYYTQLGKCMYCGKPIEIGHVFDTSNYDIDHIYPQSKIKDDSISNRVLVCSSCNKNKEDKYPLKSEIQSKQRGFWNFLQRNNFISLEKLNRLTRTTPISDDETAKFIARQLVETRQATKVAAKVLEKMFPETKIVYSKAETVSMFRNKFDIIKCREINDFHHAHDAYLNIVVGNVYNTKFTNNPWNFIKEKRDNPKIADTYNYYKVFDYDVKRNNITAWEKGKTIITVKDMLKRNTPIYTRQAACKKGELFNQTIMKKGLGQHPLKKEGPFSNISKYGGYNKVSAAYYTLIEYEEKVNKIRSLETIPLYLVKDIQKDQDVLKSYLTDLLGKKEIKILVPKIKINSLLKINGFPCHITGKTGDSFVLRPAVQFCCSNDEVLYFKKIIRFNEIRSQREKMGKTISPYEDLSFRSYIKENLCKKTKADEIGEKEFYDLLQKKNLEIYDMLLTKHKDTIYNKRPNSTTLGMLTKGRYEFINLKPKDQIIVMLEILKLFCTTREAIDLGLIKGKPAAGVATLGKKISNLDNCILIYQSITGIFEKRIDLLKV

SEQ ID NO: 806 - protein, 370 aa, Treponema denticola
MTEIETGTFLPKQISKSNAEIPYQLRKMELEKILSNAEKHFSFLKQKDEKGLSHSEKIIMLLTFKIPYYIGPINDNHKKSFPDRCWVVKKEKSPSGKTTPWNFFDHIDKEKTAEEFITSRTNFCTYLVGESVLPKSSLLYSEYTVLNEINNLQIIIDGKNICDIKLKQKIYEELFKKYKKITQKQISTFIKHEGICNKTDEVIILGIDKECTSSLKSYIELKNIFGKQVDEISTKNMLEDIIRWAAIYDEGEGKTILKTKIKAEYGKYCSDEQIKKILNLKFSGWGRLSRKFLETVTSEMPGFSEPVNIITAMRETQNNLMELLSSEFKFTENIKKINSGFEDVEKQFSYDGLVKPLFLSPSVKKCCGRL

SEQ ID NO: 807 - protein, 591 aa, Treponema phagedenis
MARGKEAEKGRTSSRYASIKALYENCKQDLADYDAVLEQFKSEEPLRLRSDKLYLYYTQLGRCMYTGRVIDIDRLMSDNSAYDIDHIYPRSKIKDDSLTNRVLVVKDANQDKRDEPLSPQIQDKQKGFWDFLKHNNFISIEKYERLTYRGYFTEEMLSGFIARQLVETRQGTKTAGQILEQLYPDSTVVYCKAANTSEFRQKFNLIKCREINDLHHAHDAYLNIAVGNVYYTKFTSNPRNFMKLKEPYNLRELFDRDVERNNTIAWVKNKTITTIKDMLKRNTPLYTRYAYCKTGGFFDQNIMKKGKGQFPLKENSPLSDISKYGGYNKVSGAYFILVQKKEKDAVVRILETVPLYLLNKPGKESENVREYLSTALGTKDFKILIPKIKINSLFKINGFLVHITGKTNDRFLVRSAVQFFCDDNLTLFFKRIIAFNGLRNLNKDKSMTAYDDNTMRVYVRGNLFKDKNQLFDKNKFNEIVKGKNISVYKDMVKRYETSIYKFRPNTAVIPILKSGEDKFINLPIEEQFKILQEILKLFGAINGTANLTLIGGRPSTGEMKISNNISNLKQCILIHQSPTGVFEQQIDLLKI

SEQ ID NO: 808 - protein, 1062 aa, Treponema sp.
MIMKLEKWRLGLDLGTNSIGWSVFSLDKDNSVQDLIDMGVRIFSDGRDPKTKEPLAVARRTARSQRKLIYRRKLRRKQVFKFLQEQGLFPKTKEECMTLKSLNPYELRIKALDEKLEPYELGRALFNLAVRRGFKSNRKDGSREEVSEKKSPDEIKTQADMQTHLEKAIKENGCRTITEFLYKNQGENGGIRFAPGRMTYYPTRKMYEEEFNLIRSKQEKYYPQVDWDDIYKAIFYQRPLKPQQRGYCIYENDKERTFKAMPCSQKLRILQDIGNLAYYEGGSKKRVELNDNQDKVLYELLNSKDKVTFDQMRKALCLADSNSFNLEENRDFLIGNPTAVKMRSKNRFGKLWDEIPLEEQDLIIETIITADEDDAVYEVIKKYDLTQEQRDFIVKNTILQSGTSMLCKEVSEKLVKRLEEIADLKYHEAVESLGYKFADQTVEKYDLLPYYGKVLPGSTMEIDLSAPETNPEKHYGKISNPTVHVALNQTRVVVNALIKEYGKPSQIAIELSRDLKNNVEKKAEIARKQNQRAKENIAINDTISALYHTAFPGKSFYPNRNDRMKYRLWSELGLGNKCIYCGKGISGAELFTKEIEIEHILPFSRTLLDAESNLTVAHSSCNAFKAERSPFEAFGTNPSGYSWQEIIQRANQLKNTSKKNKFSPNAMDSFEKDSSFIARQLSDNQYIAKAALRYLKCLVENPSDVWTTNGSMTKLLRDKWEMDSILCRKFTEKEVALLGLKPEQIGNYKKNRFDHRHHAIDAVVIGLTDRSMVQKLATKNSHKGNRIEIPEFPILRSDLIEKVKNIVVSFKPDHGAEGKLSKETLLGKIKLHGKETFVCRENIVSLSEKNLDDIVDEKIKSKVKDYVAKHKGQKIEAVLSDFSKENGIKKVRCVNRVQTPIEITSGKISRYLSPEDYFAAVIWEIPGEKKTFKAQYIRRNEVEKNSKGLNVVKPAVLENGKPHPAAKQVCLLHKDDYLEFSDKGKMYFCRIAGYAATNNKLDIRPVYAVSYCADWINSTNETMLTGYWKPTPTQNWVSVNVLFDKQKARLVTVSPIGRVFRK

SEQ ID NO: 809 - protein, 281 aa, Treponema vincentii
MKTLGLDIGTNSIGWGIVDETANKIEDCGVYIFPEGVKKEKGNESSKAAERTSFRLARRLKFRRKLRKCETLKVLIKNKMCPLTMEELEKWRKQKIYPVSQDFLNWYRTDELKNWEPYFLRKKCAEQKAGPYEIGRALYHLAQRRGFLSNRKESTKASDGKVSKSIDELSSLMDGRTLGQYFYELKQSGEKVRGKYTSRKEHYEKEFNKICEVQEISPELKDDLYRAIFFQRKLKSQKFLVGKCTFERNKPRAPISHFEFEEFRMLSFINSIKIAKKLRRR

SEQ ID NO: 810 - protein, 675 aa, uncultured bacterium
MTAENYSNVRFAFDIGTNSIGWAVFQLNDKQEATSILNAGARIFSDGRDPKTFEPLAVRRRNVRSASRMRDRYLRRRKRTLDKLIGYGLLPEDKAERDKILLETNDKPSGSTDKKTDPYSLRARALEEKLPLAYVARALFHIGQRRGFKSNRKADRKSNEKGKIAAGIEELSGLMHQSHAPTLGAYLAKRREEGHVVRLRASSEALTNKAYAFYPERAMLEDEFHKIWQAQAEYYPDVLTKEREEELFHVMFFQRPLKEQKVGLCTLVEGELRLPKSDPLFQQFRLYKEINELAIILPDLSQRKLTMEERDTLITLMRPAKTKTFAALRKALKIPAGGRFNKETENRKQLTGDEVYSVFSKPELFGGDWAKFSIEQQREIIDQLNNEENPDKLEEWLKNKFPKLSDEQRSEIINANLPDGYGRFGITATSKILEQLKKDVISEAEAAHRCGFDHSLANRNWKGLDELPRYQEVLERHIVPGTGDKNDIYDIYKGRLTNPTVHIGLNQVRRLTNRLIKAYGKPWQIVVELARDLPMSSEERKEHNKTLNDNIKAGFERTQKLERLGQKDNANNRLLLKLWEELGKDPDDRKSIYSGTRITEPMLFSGEVEIDHILPFSLTYDDSYANKILCLREENRIKRNRAPADVTEWKDRYDEIIGRSKNCQRTNKNVLGPMQ

SEQ ID NO: 811 - protein, 1017 aa, uncultured bacterium]
MRVDSLGRCLSDEEWARVIYHLCKHRGFHWISRAEAKQTEGDSKSEGGKVKQGLAGTAKLMDEKGYRSAAEMVLAEFPEAQRNKQGEYRKALSRELLAKELALLFARQRVFGNRHATDTLETAILGNSDKKSGLFWQQKPALAGADLLKMLGTCTFEKNEYRAPKASFTAERHVWLTRLNNLRIVTDGITRQLTEQERQLVLPLPYRQAGDLTYKQLGMALTKAGLLEAGCFKFIGLAYPTEAQKAEGKTKDPESATLVKIPAWQELRQTLNKASLNDEWEKLSGDALCGQPEIFDKIAWILSVYKDDDEVRTELAKLVLPNPEGLTEALLNIRFDKFHALSLKALRAIVPHMEKGLRYDEACVQAGYHHSQLHKIGEGEHKYLPPLYDGRDGDGRMIFAEDADIPRNPVVLRSLNQARKVVNAIIRRYGSPSAVHIEMARDLSRPFDERNKIKKDQDEYQARNQRDREQFIELFGHPPKGLEFEKWRLYREQNGQCAYSQKPLASSGDVAEIFLDGSTEIDHALPYSRSFDDSKNNKVLVLTRENRDKGNRTPYEYLGGAENSERWQRFFSFVESNKAYRLAKRTRLLRKDFGAKESEEFRERNLNDTRYVCRFFKNYVEQHLKLAEGSEAKRCVVVSGQLTNFLRTRWGLLKIRSDSDRHHALDAAVVAACSHSMVQRLSNYSRTRELEQVRDGFVNIETGEIVNPAMHQQLREHFPDPWPYFRHELEARLKIDSPALLREEMARLSSYTEEELAALKPLFVSRAPQRRNGGAAHKDTIYGQPEKLKKNGSVSQKVALASLALKDIDLLADPHRNAKLYGAIRERLEAHGGKGDKAFPATNPLRKPDKEGNPTGPIVRTVTKVIDKLSGIPVRGGIAKNDTMLRVDVFTKAGRFHLVPVYVHHRVTGLPNQAITRGKDENQWAIIDDTFEWRFSLYPNDLVQIRLKDETHLGYYASTDRSTSSISIWAHDRNQSVGKDGLIRSIGVTTAKDIEKFHVDTLGNVYPAPPEKRRGLA

SEQ ID NO: 812 - protein, 600 aa, uncultured bacterium]
VNAIIKKHGSLSAVHIEMARDLSRPLDERREVKKLQEEFKDRNDKARESFEADHGYRPKGIVFEKWMLYREQHGKCAYSMEGLDIDRVLNDANYAQIDHALPYSRSYDDSKNNKVLVLTRENQNKGNRTAYEYLTSFAGGEDGDRWRNYAAWVNSNKSYRMAKRNRLLRKNYGPDEASGFKDRNLNDTRYICKFFKNYVEEHLQLAPRADGNANKRCVVVNGQLTAFLRARWGLSKVRSESDRHHALDAAVVAACSHGMVKALADYARNKEVAYLREGFPDPETGEIINPEAHARGVHHFPEPWAHFRHELQVRLYSDDLQALREDLQRLGTYSEQDLLGVRTLFVSRAPQRRNDGAVHKETIYAQPEALRKQGGVVQKVPLTSLSLKDLDNLADPHRNAKLYTALRARLEAHGGKADKAFGPDQPFYKPDKNGNPTGPIVRTIKLVIDKLSGIPIRGGVAKNDTMLRVDVFTKAGKFHLVPVYVHHRVTGLPDRAIVAFKDEVEWTQVDDSFKFLFSIHPNDLIRIGLKAKEPMIGYFASCHRGTGAFNVWSHDRNTSVGKSGSVEGIGIKTALSLEKLNIDVLGNVYPARPEQRHGLA

SEQ ID NO: 813 - protein, 1011 aa, uncultured delta
MSSKAIDSLEQLDLFKPQEYTLGLDLGIKSIGWAILSGERIANAGVYLFETAEELNSTGNKLISKAAERGRKRRIRRMLDRKARRGRHIRYLLEREGLPTDELEEVVVHQSNRTLWDVRAEAVERKLTKQELAAVLFHLVRHRGYFPNTKKLPPDDESDSADEEQGKINRATSRLREELKASDCKTIGQFLAQNRDRQRNREGDYSNLMARKLVFEEALQILAFQRKQGHELSKDFEKTYLDVLMGQRSGRSPKLGNCSLIPSELRAPSSAPSTEWFKFLQNLGNLQISNAYREEWSIDAPRRAQIIDACSQRSTSSYWQIRRDFQIPDEYRFNLVNYERRDPDVDLQEYLQQQERKTLANFRNWKQLEKIIGTGHPIQTLDEAARLITLIKDDEKLSDQLADLLPEASDKAITQLCELDFTTAAKISLEAMYRILPHMNQGMGFFDACQQESLPEIGVPPAGDRVPPFDEMYNPVVNRVLSQSRKLINAVIDEYGMPAKIRVELARDLGKGRELRERIKLDQLDKSKQNDQRAEDFRAEFQQAPRGDQSLRYRLWKEQNCTCPYSGRMIPVNSVLSEDTQIDHILPISQSFDNSLSNKVLCFTEENAQKSNRTPFEYLDAADFQRLEAISGNWPEAKRNKLLHKSFGKVAEEWKSRALNDTRYLTSALADHLRHHLPDSKIQTVNGRITGYLRKQWGLEKDRDKHTHHAVDAIVVACTTPAIVQQVTLYHQDIRRYKKLGEKRPTPWPETFRQDVLDVEEEIFITRQPKKVSGGIQTKDTLRKHRSKPDRQRVALTKVKLADLERLVEKDASNRNLYEHLKQCLEESGDQPTKAFKAPFYMPSGPEAKQRPILSKVTLLREKPEPPKQLTELSGGRRYDSMAQGRLDIYRYKPGGKRKDEYRVVLQRMIDLMRGEENVHVFQKGVPYDQGPEIEQNYTFLFSLYFDDLVEFQRSADSEVIRGYYRTFNIANGQLKISTYLEGRQDFDFFGANRLAHFAKVQVNLLGKVIK

SEQ ID NO: 814 - protein, 1011 aa, uncultured delta proteobacterium HF0070_07E19; identical to SEQ ID NO: 813

SEQ ID NO: 815 - protein, 1120 aa, Veillonella sp.
MGFKANLVNLFTDEDIEVILPEEKEFKSINLHEGIYEDVRDAYEDAWGDRFAIVDQCKVLHDIIVISSIIKPGQSLSEAKIESYNQHKEDLVLLKSVLKEDRKLYDDMFVVDTDKGTNYVKYTKQGVNGNTSATQEEFYKYVRKVVSVLPETEHTRRIVQKLEEGTFLPLQRISKNGVVPYQLHKEELVRILDKATVNFPFLNKVENGLTVADKIISILEFKIPYYVGPLNPTHSIENGGFAWVVRKEAGQVLPWNFEQKVDVQASAVKFIENLTNKCTYLIDQDVLPKYSLLYAEFSLLNELNNIRVNDKPLPADVKQAFIRDHFISLQDSKTATKKVVAKYLVDNNYVSQPPIITGMDQQIATKLTSHRDMTRILGEHFDHAMAEDIIRYITIFGESKDMLRQVLKNYYGDRLTTEQIKKLGKLTYTGWGRLSKKFLSDIWGMKKNDDDAEAGTIIEHMREGQENLMQLLSSSYSFIDVVQEYVTNVLGEKEKTAFEMLEDLSLSPMVKRSVWQTLRILDEIVSIRKELPKKIFVEVARTNKADKKRTQSRKALLEELYKQIKDEDVHVLQQELESKEDSALNSKKLYLYFTQMGRCMYSGRRIDIHELFTDKYDIDHIYPRSLTKDDSWHNIVLVEKQLNAEKTDRFPILSAIQSKQKGFWKLLWDRGFISEKKYDRLVRTTDLTDEELNQFINRQMVSTNQSVKAVTTLLHQLYPETEVVFSKAENVSDFRHDYDFVKVRSINHHHHAKDAYLNIVVGNVYHEKFTKNFLSFAKQKGTRRTYNLTKIFEYEIKLTEESKKVIWDPNIHMDIVKKMMKSNDVRVTQRAVPQKGGLSDETIYKKGIAKRGVYLPLKSSDERVRDVEKYGGRTSITISEYIILNIRDTSDQDRIEIFSLPLYIAGKKDIHKAIEEAYLSTCKKPASVVDIQILYRGLYIGSKVNINGFTYYMGGKTGSNVSIDSAVDVVMDITSSVYIKLLEKVAIKKIENPKTFRIENIKTSYNHKEVTVSKEQNIALYQELLKKLDTPLFSKMKGNKLEEFRTVGFDTFIALSLEEQASVLLEVLNVLTNFKTKRDITKIGMTSSRSTLGINISNTEQFSVITTSITGLYEQEIKIK

SEQ ID NO: 816 - protein, 983 aa, Verminephrobacter aporrectodeae
MRRRRDRLLKRKARMHDQLMRHGFFPADAAGRKVLERLNPYQLRAKGLHQALTPGEFARALFHINQRRGFQSNRKTDRKDNESGALKQAISELRAQIHDSGCATVGEWFWKERMQQKPEGVHRQGVRARYRETPYTTDEGRQRIDKRYDLYVDRAMIEQEFDALWAVQAALQPGLFTDAACKELRYTLLFQRKLRPVKPGRCTLLPEEERAPLALPSTQRFRILQEVNHLRLLDEALREVPLTLAQRDALVAALESQGKLGFAPMRKLLKLPGTVKFNLEDEKRTELKGNATSAILARKDLFGPAWAGFDAALQDEIVWQLVSEEGEGRLIAWLQQHTGVDEARAEAIADTSLPEGYGSLSRKALERIVPALQREVCSYDKAVQAAGFAHHSDLGFDFEHSGDEVQQVGERIIASTGEVRPLFAFKQLPYYGKALQRHVAFGSGKPEDPEEKRHGKIANPTVHIGLNQVRTVVNALIRRYGRPSEVVVELARDLKQSREQQQETQRKQAENQRRNTRIRERIAETLGISPERVRSSDIQKWILWEELSFDVVDRRCPYSGEQISTTMLLSPKVEIEHILPFSQTLDDSLNNRTVALREANRIKRNRTPWDARADFEARGWSYEGILHRAERMPLRKRYRFAPDGYQRWLGEDKDFLARALNDTRYLSRVAANYLRLVCPKPQGVRVIPGRMTAMLRAKFGLNDVLGLDGEKNRNDHRHHAVDACVIGVTDQGLMQRFARASAQAREDGLTRLVQDMPLPWPSYRDHVERAVRHIWVSHKPDHGFEGAMMEETAYGIRKDGSIKPRRKADGSAGREVVNLIRITESRQPVRHGVDSQGQPLPYKGYVGGSNYCIEITANDQGKWEGAVISTFEAYRIVRASGWGRLRHCSHGQNGRPLMMRLMIGDAVRLALDGSEKTMRVVKISANGQVFLVAPNEANVDARNRDKADPFAYVSKKAGSFQSAKARQVSISPIGELRDPGFKG

SEQ ID NO: 817 - protein, 4 aa, Artificial sequence
  Synthetic Sequence
AAAA

SEQ ID NO: 818 - protein, 1300 aa, Francisella tularensis
MSIYQEFVNKYSLSKTLRFELIPQGKTLENIKARGLILDDEKRAKDYKKAKQIIDKYHQFFIEEILSSVCISEDLLQNYSDVYFKLKKSDDDNLQKDFKSAKDTIKKQISEYIKDSEKFKNLFNQNLIDAKKGQESDLILWLKQSKDNGIELFKANSDITDIDEALEIIKSFKGWTTYFKGFHENRKNVYSSNDIPTSIIYRIVDDNLPKFLENKAKYESLKDKAPEAINYEQIKKDLAEELTFDIDYKTSEVNQRVFSLDEVFEIANFNNYLNQSGITKFNTIIGGKFVNGENTKRKGINEYINLYSQQINDKTLKKYKMSVLFKQILSDTESKSFVIDKLEDDSDVVTTMQSFYEQIAAFKTVEEKSIKETLSLLFDDLKAQKLDLSKIYFKNDKSLTDLSQQVFDDYSVIGTAVLEYITQQIAPKNLDNPSKKEQELIAKKTEKAKYLSLETIKLALEEFNKHRDIDKQCRFEEILANFAAIPMIFDEIAQNKDNLAQISIKYQNQGKKDLLQASAEDDVKAIKDLLDQTNNLLHKLKIFHISQSEDKANILDKDEHFYLVFEECYFELANIVPLYNKIRNYITQKPYSDEKFKLNFENSTLANGWDKNKEPDNTAILFIKDDKYYLGVMNKKNNKIFDDKAIKENKGEGYKKIVYKLLPGANKMLPKVFFSAKSIKFYNPSEDILRIRNHSTHTKNGSPQKGYEKFEFNIEDCRKFIDFYKQSISKHPEWKDFGFRFSDTQRYNSIDEFYREVENQGYKLTFENISESYIDSVVNQGKLYLFQIYNKDFSAYSKGRPNLHTLYWKALFDERNLQDVVYKLNGEAELFYRKQSIPKKITHPAKEAIANKNKDNPKKESVFEYDLIKDKRFTEDKFFFHCPITINFKSSGANKFNDEINLLLKEKANDVHILSIDRGERHLAYYTLVDGKGNIIKQDTFNIIGNDRMKTNYHDKLAAIEKDRDSARKDWKKINNIKEMKEGYLSQVVHEIAKLVIEYNAIVVFEDLNFGFKRGRFKVEKQVYQKLEKMLIEKLNYLVFKDNEFDKTGGVLRAYQLTAPFETFKKMGKQTGIIYYVPAGFTSKICPVTGFVNQLYPKYESVSKSQEFFSKFDKICYNLDKGYFEFSFDYKNFGDKAAKGKWTIASFGSRLINFRNSDKNHNWDTREVYPTKELEKLLKDYSIEYGHGECIKAAICGESDKKFFAKLTSVLNTILQMRNSKTGTELDYLISPVADVNGNFFDSRQAPKNMPQDADANGAYHIGLKGLMLLGRIKNNQEGKKLNLVIKNEEYFEFVQNRNN

SEQ ID NO: 819 - protein, 1307 aa, unknown
  Synthetic Sequence
MTQFEGFTNLYQVSKTLRFELIPQGKTLKHIQEQGFIEEDKARNDHYKELKPIIDRIYKTYADQCLQLVQLDWENLSAAIDSYRKEKTEETRNALIEEQATYRNAIHDYFIGRTDNLTDAINKRHAEIYKGLFKAELFNGKVLKQLGTVTTTEHENALLRSFDKFTTYFSGFYENRKNVFSAEDISTAIPHRIVQDNFPKFKENCHIFTRLITAVPSLREHFENVKKAIGIFVSTSIEEVFSFPFYNQLLTQTQIDLYNQLLGGISREAGTEKIKGLNEVLNLAIQKNDETAHIIASLPHRFIPLFKQILSDRNTLSFILEEFKSDEEVIQSFCKYKTLLRNENVLETAEALFNELNSIDLTHIFISHKKLETISSALCDHWDTLRNALYERRISELTGKITKSAKEKVQRSLKHEDINLQEIISAAGKELSEAFKQKTSEILSHAHAALDQPLPTTLKKQEEKEILKSQLDSLLGLYHLLDWFAVDESNEVDPEFSARLTGIKLEMEPSLSFYNKARNYATKKPYSVEKFKLNFQMPTLASGWDVNKEKNNGAILFVKNGLYYLGIMPKQKGRYKALSFEPTEKTSEGFDKMYYDYFPDAAKMIPKCSTQLKAVTAHFQTHTTPILLSNNFIEPLEITKEIYDLNNPEKEPKKFQTAYAKKTGDQKGYREALCKWIDFTRDFLSKYTKTTSIDLSSLRPSSQYKDLGEYYAELNPLLYHISFQRIAEKEIMDAVETGKLYLFQIYNKDFAKGHHGKPNLHTLYWTGLFSPENLAKTSIKLNGQAELFYRPKSRMKRMAHRLGEKMLNKKLKDQKTPIPDTLYQELYDYVNHRLSHDLSDEARALLPNVITKEVSHEIIKDRRFTSDKFFFHVPITLNYQAANSPSKFNQRVNAYLKEHPETPIIGIDRGERNLIYITVIDSTGKILEQRSLNTIQQFDYQKKLDNREKERVAARQAWSVVGTIKDLKQGYLSQVIHEIVDLMIHYQAVVVLENLNFGFKSKRTGIAEKAVYQQFEKMLIDKLNCLVLKDYPAEKVGGVLNPYQLTDQFTSFAKMGTQSGFLFYVPAPYTSKIDPLTGFVDPFVWKTIKNHESRKHFLEGFDFLHYDVKTGDFILHFKMNRNLSFQRGLPGFMPAWDIVFEKNETQFDAKGTPFIAGKRIVPVIENHRFTGRYRDLYPANELIALLEEKGIVFRDGSNILPKLLENDDSHAIDTMVALIRSVLQMRNSNAATGEDYINSPVRDLNGVCFDSRFQNPEWPMDADANGAYHIALKGQLLLNHLKESKDLKLQNGISNQDWLAYIQELRN

SEQ ID NO: 820 - protein, 1246 aa, unknown
  Synthetic Sequence
MLKNVGIDRLDVEKGRKNMSKLEKFTNCYSLSKTLRFKAIPVGKTQENIDNKRLLVEDEKRAEDYKGVKKLLDRYYLSFINDVLHSIKLKNLNNYISLFRKKTRTEKENKELENLEINLRKEIAKAFKGNEGYKSLFKKDIIETILPEFLDDKDEIALVNSFNGFTTAFTGFFDNRENMFSEEAKSTSIAFRCINENLTRYISNMDIFEKVDAIFDKHEVQEIKEKILNSDYDVEDFFEGEFFNFVLTQEGIDVYNAIIGGFVTESGEKIKGLNEYINLYNQKTKQKLPKFKPLYKQVLSDRESLSFYGEGYTSDEEVLEVFRNTLNKNSEIFSSIKKLEKLFKNFDEYSSAGIFVKNGPAISTISKDIFGEWNVIRDKWNAEYDDIHLKKKAVVTEKYEDDRRKSFKKIGSFSLEQLQEYADADLSVVEKLKEIIIQKVDEIYKVYGSSEKLFDADFVLEKSLKKNDAVVAIMKDLLDSVKSFENYIKAFFGEGKETNRDESFYGDFVLAYDILLKVDHIYDAIRNYVTQKPYSKDKFKLYFQNPQFMGGWDKDKETDYRATILRYGSKYYLAIMDKKYAKCLQKIDKDDVNGNYEKINYKLLPGPNKMLPKVFFSKKWMAYYNPSEDIQKIYKNGTFKKGDMFNLNDCHKLIDFFKDSISRYPKWSNAYDFNFSETEKYKDIAGFYREVEEQGYKVSFESASKKEVDKLVEEGKLYMFQIYNKDFSDKSHGTPNLHTMYFKLLFDENNHGQIRLSGGAELFMRRASLKKEELVVHPANSPIANKNPDNPKKTTTLSYDVYKDKRFSEDQYELHIPIAINKCPKNIFKINTEVRVLLKHDDNPYVIGIDRGERNLLYIVVVDGKGNIVEQYSLNEIINNFNGIRIKTDYHSLLDKKEKERFEARQNWTSIENIKELKAGYISQVVHKICELVEKYDAVIALEDLNSGFKNSRVKVEKQVYQKFEKMLIDKLNYMVDKKSNPCATGGALKGYQITNKFESFKSMSTQNGFIFYIPAWLTSKIDPSTGFVNLLKTKYTSIADSKKFISSFDRIMYVPEEDLFEFALDYKNFSRTDADYIKKWKLYSYGNRIRIFRNPKKNNVFDWEEVCLTSAYKELFNKYGINYQQGDIRALLCEQSDKAFYSSFMALMSLMLQMRNSITGRTDVDFLISPVKNSDGIFYDSRNYEAQENAILPKNADANGAYNIARKVLWAIGQFKKAEDEKLDKVKIAISNKEWLEYAQTSVKH

SEQ ID NO: 821 - protein, 1246 aa, Porphyromonas macacae
MKTQHFFEDFTSLYSLSKTIRFELKPIGKTLENIKKNGLIRRDEQRLDDYEKLKKVIDEYHEDFIANILSSFSFSEEILQSYIQNLSESEARAKIEKTMRDTLAKAFSEDERYKSIFKKELVKKDIPVWCPAYKSLCKKFDNFTTSLVPFHENRKNLYTSNEITASIPYRIVHVNLPKFIQNIEALCELQKKMGADLYLEMMENLRNVWPSFVKTPDDLCNLKTYNHLMVQSSISEYNRFVGGYSTEDGTKHQGINEWINIYRQRNKEMRLPGLVFLHKQILAKVDSSSFISDTLENDDQVFCVLRQFRKLFWNTVSSKEDDAASLKDLFCGLSGYDPEAIYVSDAHLATISKNIFDRWNYISDAIRRKTEVLMPRKKESVERYAEKISKQIKKRQSYSLAELDDLLAHYSEESLPAGFSLLSYFTSLGGQKYLVSDGEVILYEEGSNIWDEVLIAFRDLQVILDKDFTEKKLGKDEEAVSVIKKALDSALRLRKFFDLLSGTGAEIRRDSSFYALYTDRMDKLKGLLKMYDKVRNYLTKKPYSIEKFKLHFDNPSLLSGWDKNKELNNLSVIFRQNGYYYLGIMTPKGKNLFKTLPKLGAEEMFYEKMEYKQIAEPMLMLPKVFFPKKTKPAFAPDQSVVDIYNKKTFKTGQKGFNKKDLYRLIDFYKEALTVHEWKLFNFSFSPTEQYRNIGEFFDEVREQAYKVSMVNVPASYIDEAVENGKLYLFQIYNKDFSPYSKGIPNLHTLYWKALFSEQNQSRVYKLCGGGELFYRKASLHMQDTTVHPKGISIHKKNLNKKGETSLFNYDLVKDKRFTEDKFFFHVPISINYKNKKITNVNQMVRDYIAQNDDLQIIGIDRGERNLLYISRIDTRGNLLEQFSLNVIESDKGDLRTDYQKILGDREQERLRRRQEWKSIESIKDLKDGYMSQVVHKICNMVVEHKAIVVLENLNLSFMKGRKKVEKSVYEKFERMLVDKLNYLVVDKKNLSNEPGGLYAAYQLTNPLFSFEELHRYPQSGILFFVDPWNTSLTDPSTGFVNLLGRINYTNVGDARKFFDRFNAIRYDGKGNILFDLDLSRFDVRVETQRKLWTLTTFGSRIAKSKKSGKWMVERIENLSLCFLELFEQFNIGYRVEKDLKKAILSQDRKEFYVRLIYLFNLMMQIRNSDGEEDYILSPALNEKNLQFDSRLIEAKDLPVDADANGAYNVARKGLMVVQRIKRGDHESIHRIGRAQWLRYVQEGIVE

SEQ ID NO: 822 - protein, 1326 aa, Prevotella disiens
MKVMENYQEFTNLFQLNKTLRFELKPIGKTCELLEEGKIFASGSFLEKDKVRADNVSYVKKEIDKKHKIFIEETLSSFSISNDLLKQYFDCYNELKAFKKDCKSDEEEVKKTALRNKCTSIQRAMREAISQAFLKSPQKKLLAIKNLIENVFKADENVQHFSEFTSYFSGFETNRENFYSDEEKSTSIAYRLVHDNLPIFIKNIYIFEKLKEQFDAKTLSEIFENYKLYVAGSSLDEVFSLEYFNNTLTQKGIDNYNAVIGKIVKEDKQEIQGLNEHINLYNQKHKDRRLPFFISLKKQILSDREALSWLPDMFKNDSEVIKALKGFYIEDGFENNVLTPLATLLSSLDKYNLNGIFIRNNEALSSLSQNVYRNFSIDEAIDANAELQTFNNYELIANALRAKIKKETKQGRKSFEKYEEYIDKKVKAIDSLSIQEINELVENYVSEFNSNSGNMPRKVEDYFSLMRKGDFGSNDLIENIKTKLSAAEKLLGTKYQETAKDIFKKDENSKLIKELLDATKQFQHFIKPLLGTGEEADRDLVFYGDFLPLYEKFEELTLLYNKVRNRLTQKPYSKDKIRLCFNKPKLMTGWVDSKTEKSDNGTQYGGYLFRKKNEIGEYDYFLGISSKAQLFRKNEAVIGDYERLDYYQPKANTIYGSAYEGENSYKEDKKRLNKVIIAYIEQIKQTNIKKSIIESISKYPNISDDDKVTPSSLLEKIKKVSIDSYNGILSFKSFQSVNKEVIDNLLKTISPLKNKAEFLDLINKDYQIFTEVQAVIDEICKQKTFIYFPISNVELEKEMGDKDKPLCLFQISNKDLSFAKTFSANLRKKRGAENLHTMLFKALMEGNQDNLDLGSGAIFYRAKSLDGNKPTHPANEAIKCRNVANKDKVSLFTYDIYKNRRYMENKFLFHLSIVQNYKAANDSAQLNSSATEYIRKADDLHIIGIDRGERNLLYYSVIDMKGNIVEQDSLNIIRNNDLETDYHDLLDKREKERKANRQNWEAVEGIKDLKKGYLSQAVHQIAQLMLKYNAIIALEDLGQMFVTRGQKIEKAVYQQFEKSLVDKLSYLVDKKRPYNELGGILKAYQLASSITKNNSDKQNGFLFYVPAWNTSKIDPVTGFTDLLRPKAMTIKEAQDFFGAFDNISYNDKGYFEFETNYDKFKIRMKSAQTRWTICTFGNRIKRKKDKNYWNYEEVELTEEFKKLFKDSNIDYENCNLKEEIQNKDNRKFFDDLIKLLQLTLQMRNSDDKGNDYIISPVANAEGQFFDSRNGDKKLPLDADANGAYNIARKGLWNIRQIKQTKNDKKLNLSISSTEWLDFVREKPYLK

SEQ ID NO: 823 - protein, 1129 aa, Alicyclobacillus acidoterrestris
MAVKSIKVKLRLDDMPEIRAGLWKLHKEVNAGVRYYTEWLSLLRQENLYRRSPNGDGEQECDKTAEECKAELLERLRARQVENGHRGPAGSDDELLQLARQLYELLVPQAIGAKGDAQQIARKFLSPLADKDAVGGLGIAKAGNKPRWVRMREAGEPGWEEEKEKAETRKSADRTADVLRALADFGLKPLMRVYTDSEMSSVEWKPLRKGQAVRTWDRDMFQQAIERMMSWESWNQRVGQEYAKLVEQKNRFEQKNFVGQEHLVHLVNQLQQDMKEASPGLESKEQTAHYVTGRALRGSDKVFEKWGKLAPDAPFDLYDAEIKNVQRRNTRRFGSHDLFAKLAEPEYQALWREDASFLTRYAVYNSILRKLNHAKMFATFTLPDATAHPIWTRFDKLGGNLHQYTFLFNEFGERRHAIRFHKLLKVENGVAREVDDVTVPISMSEQLDNLLPRDPNEPIALYFRDYGAEQHFTGEFGGAKIQCRRDQLAHMHRRRGARDVYLNVSVRVQSQSEARGERRPPYAAVFRLVGDNHRAFVHFDKLSDYLAEHPDDGKLGSEGLLSGLRVMSVDLGLRTSASISVFRVARKDELKPNSKGRVPFFFPIKGNDNLVAVHERSQLLKLPGETESKDLRAIREERQRTLRQLRTQLAYLRLLVRCGSEDVGRRERSWAKLIEQPVDAANHMTPDWREAFENELQKLKSLHGICSDKEWMDAVYESVRRVWRHMGKQVRDWRKDVRSGERPKIRGYAKDVVGGNSIEQIEYLERQYKFLKSWSFFGKVSGQVIRAEKGSRFAITLREHIDHAKEDRLKKLADRIIMEALGYVYALDERGKGKWVAKYPPCQLILLEELSEYQFNNDRPPSENNQLMQWSHRGVFQELINQAQVHDLLVGTMYAAFSSRFDARTGAPGIRCRRVPARCTQEHNPEPFPWWLNKFVVEHTLDACPLRADDLIPTGEGEIFVSPFSAEEGDFHQIHADLNAAQNLQQRLWSDFDISQIRLRCDWGEVDGELVLIPRLTGKRTADSYSNKVFYTNTGVTYYERERGKKRRKVFAQEKLSEEEAELLVEADEAREKSVVLMRDPSGIINRGNWTRQKEFWSMVNQRIEGYLVKQIRSRVPLQDSACENTGDI

SEQ ID NO: 824 - protein, 872 aa, Alicyclobacillus contaminans
MGFNTAELLRKVEEEMRKTSVGFDTDNPFAHRITRRAIRGWDRIAEAWRRLPPDAPESEYIEAFKDIQRKNPRKIGSEPLFKNLAAPGVRSELLNNPQVLITFAKYNELQRQLAKAKQFAQKTLPHPVFHPVWVRYDKLGGNLHHYQIEPAVHANDTHKVKFSSLLLPQEDGSYAEVKDVTVSLAPSLQFPTGLVHPKVTTPPRTGLVTVMDEEAGKPVVCYRDRGHDALVPVAFGGAKLQFNRAHLSAGYRKGVLSAGGGGSIYFNVTLDVQVPNERDVSKTFSFSRDRDLVSLKAEELKRYMETKPLGMPGVRVMSVDLGVRYGAAISVFEVKPFAEVRKDKLHYPITGCEGFVAEHERSVILKLPGEGVRTAGKQSERKQALAAIRAEMSILRKWLRVSQVTEEDRAKAVRGLLEDERGGGWTMDPGEDSDHQPLQQFLHEARLAVGELVNLVHLSPAEWERAVIERHRRLERITASHIRVFQTMRKVWGKRRNEDAAHTGGISLAHIEHLIQQRKLFIRWSTHARTYGEVRRLPKHEGFAKRLQKHTNHVKEDRIKKLADMIVMAARGYRFLDKRARWVKTRHAPCDLILFEDLSRYRFTMDRPPTENSQLMNWSHRELLKTVKMQAALFGIGVGTVPAAFTSRFDAQTGAPGLRCKRVTKQDKEKTPFWLIQFAEITGVNVTNVEPGQLIPVDGGEWFVSPKGPRAADGLKCVHADINAAHNLQRRFWIPRLPSVKCRRYVEAEGFAAVPSSTAFMKVHGKGAFVSVDGEFYEYQKGRRVAVNRADRTSSTLDEDEGDIGEEMLVSSNGAGEFVRMFYDESGYVGYGRWMDSKVFWGKVRQIVHRAIQDQVEKRAAARGENGATSSR

SEQ ID NO: 825 - protein, 1149 aa, Desulfovibrio inopinatus
MPTRTINLKLVLGKNPENATLRRALFSTHRLVNQATKRIEEFLLLCRGEAYRTVDNEGKEAEIPRHAVQEEALAFAKAAQRHNGCISTYEDQEILDVLRQLYERLVPSVNENNEAGDAQAANAWVSPLMSAESEGGLSVYDKVLDPPPVWMKLKEEKAPGWEAASQIWIQSDEGQSLLNKPGSPPRWIRKLRSGQPWQDDFVSDQKKKQDELTKGNAPLIKQLKEMGLLPLVNPFFRHLLDPEGKGVSPWDRLAVRAAVAHFISWESWNHRTRAEYNSLKLRRDEFEAASDEFKDDFTLLRQYEAKRHSTLKSIALADDSNPYRIGVRSLRAWNRVREEWIDKGATEEQRVTILSKLQTQLRGKFGDPDLFNWLAQDRHVHLWSPRDSVTPLVRINAVDKVLRRRKPYALMTFAHPRFHPRWILYEAPGGSNLRQYALDCTENALHITLPLLVDDAHGTWIEKKIRVPLAPSGQIQDLTLEKLEKKKNRLYYRSGFQQFAGLAGGAEVLFHRPYMEHDERSEESLLERPGAVWFKLTLDVATQAPPNWLDGKGRVRTPPEVHHFKTALSNKSKHTRTLQPGLRVLSVDLGMRTFASCSVFELIEGKPETGRAFPVADERSMDSPNKLWAKHERSFKLTLPGETPSRKEEEERSIARAEIYALKRDIQRLKSLLRLGEEDNDNRRDALLEQFFKGWGEEDVVPGQAFPRSLFQGLGAAPFRSTPELWRQHCQTYYDKAEACLAKHISDWRKRTRPRPTSREMWYKTRSYHGGKSIWMLEYLDAVRKLLLSWSLRGRTYGAINRQDTARFGSLASRLLHHINSLKEDRIKTGADSIVQAARGYIPLPHGKGWEQRYEPCQLILFEDLARYRFRVDRPRRENSQLMQWNHRAIVAETTMQAELYGQIVENTAAGFSSRFHAATGAPGVRCRFLLERDFDNDLPKPYLLRELSWMLGNTKVESEEEKLRLLSEKIRPGSLVPWDGGEQFATLHPKRQTLCVIHADMNAAQNLQRRFFGRCGEAFRLVCQPHGDDVLRLASTPGARLLGALQQLENGQGAFELVRDMGSTSQMNRFVMKSLGKKKIKPLQDNNGDDELEDVLSVLPEEDDTGRITVFRDSSGIFFPCNVWIPAKQFWPAVRAMIWKVMASHSLG

SEQ ID NO: 826 - protein, 1194 aa, Desulfonatronum thiodismutans
MVLGRKDDTAELRRALWTTHEHVNLAVAEVERVLLRCRGRSYWTLDRRGDPVHVPESQVAEDALAMAREAQRRNGWPVVGEDEEILLALRYLYEQIVPSCLLDDLGKPLKGDAQKIGTNYAGPLFDSDTCRRDEGKDVACCGPFHEVAGKYLGALPEWATPISKQEFDGKDASHLRFKATGGDDAFFRVSIEKANAWYEDPANQDALKNKAYNKDDWKKEKDKGISSWAVKYIQKQLQLGQDPRTEVRRKLWLELGLLPLFIPVFDKTMVGNLWNRLAVRLALAHLLSWESWNHRAVQDQALARAKRDELAALFLGMEDGFAGLREYELRRNESIKQHAFEPVDRPYVVSGRALRSWTRVREEWLRHGDTQESRKNICNRLQDRLRGKFGDPDVFHWLAEDGQEALWKERDCVTSFSLLNDADGLLEKRKGYALMTFADARLHPRWAMYEAPGGSNLRTYQIRKTENGLWADVVLLSPRNESAAVEEKTFNVRLAPSGQLSNVSFDQIQKGSKMVGRCRYQSANQQFEGLLGGAEILFDRKRIANEQHGATDLASKPGHVWFKLTLDVRPQAPQGWLDGKGRPALPPEAKHFKTALSNKSKFADQVRPGLRVLSVDLGVRSFAACSVFELVRGGPDQGTYFPAADGRTVDDPEKLWAKHERSFKITLPGENPSRKEEIARRAAMEELRSLNGDIRRLKAILRLSVLQEDDPRTEHLRLFMEAIVDDPAKSALNAELFKGFGDDRFRSTPDLWKQHCHFFHDKAEKVVAERFSRWRTETRPKSSSWQDWRERRGYAGGKSYWAVTYLEAVRGLILRWNMRGRTYGEVNRQDKKQFGTVASALLHHINQLKEDRIKTGADMIIQAARGFVPRKNGAGWVQVHEPCRLILFEDLARYRFRTDRSRRENSRLMRWSHREIVNEVGMQGELYGLHVDTTEAGFSSRYLASSGAPGVRCRHLVEEDFHDGLPGMHLVGELDWLLPKDKDRTANEARRLLGGMVRPGMLVPWDGGELFATLNAASQLHVIHADINAAQNLQRRFWGRCGEAIRIVCNQLSVDGSTRYEMAKAPKARLLGALQQLKNGDAPFHLTSIPNSQKPENSYVMTPTNAGKKYRAGPGEKSSGEEDELALDIVEQAEELAQGRKTFFRDPSGVFFAPDRWLPSEIYWSRIRRRIWQVTLERNSSGRQERAEMDEMPY

SEQ ID NO: 827 - protein, 1132 aa, Tuberibacillus calidus
MATKSFILKMKTKNNPQLRLSLWKTHELFNFGVAYYMDLLSLFRQKDLYMHNDEDPDHPVVLKKEEIQERLWMKVRETQQKNGFHGEVSKDEVLETLRALYEELVPSAVGKSGEANQISNKYLYPLTDPASQSGKGTANSGRKPRWKKLKEAGDPSWKDAYEKWEKERQEDPKLKILAALQSFGLIPLFRPFTENDHKAVISVKWMPKSKNQSVRKFDKDMFNQAIERFLSWESWNEKVAEDYEKTVSIYESLQKELKGISTKAFEIMERVEKAYEAHLREITFSNSTYRIGNRAIRGWTEIVKKWMKLDPSAPQGNYLDVVKDYQRRHPRESGDFKLFELLSRPENQAAWREYPEFLPLYVKYRHAEQRMKTAKKQATFTLCDPIRHPLWVRYEERSGTNLNKYRLIMNEKEKVVQFDRLICLNADGHYEEQEDVTVPLAPSQQFDDQIKFSSEDTGKGKHNFSYYHKGINYELKGTLGGARIQFDREHLLRRQGVKAGNVGRIFLNVTLNIEPMQPFSRSGNLQTSVGKALKVYVDGYPKVVNFKPKELTEHIKESEKNTLTLGVESLPTGLRVMSVDLGQRQAAAISIFEVVSEKPDDNKLFYPVKDTDLFAVHRTSFNIKLPGEKRTERRMLEQQKRDQAIRDLSRKLKFLKNVLNMQKLEKTDEREKRVNRWIKDREREEENPVYVQEFEMISKVLYSPHSVWVDQLKSIHRKLEEQLGKEISKWRQSISQGRQGVYGISLKNIEDIEKTRRLLFRWSMRPENPGEVKQLQPGERFAIDQQNHLNHLKDDRIKKLANQIVMTALGYRYDGKRKKWIAKHPACQLVLFEDLSRYAFYDERSRLENRNLMRWSRREIPKQVAQIGGLYGLLVGEVGAQYSSRFHAKSGAPGIRCRVVKEHELYITEGGQKVRNQKFLDSLVENNIIEPDDARRLEPGDLIRDQGGDKFATLDERGELVITHADINAAQNLQKRFWTRTHGLYRIRCESREIKDAVVLVPSDKDQKEKMENLFGIGYLQPFKQENDVYKWVKGEKIKGKKTSSQSDDKELVSEILQEASVMADELKGNRKTLFRDPSGYVFPKDRWYTGGRYFGTLEHLLKRKLAERRLFDGGSSRRGLFNGTDSNTNVE

SEQ ID NO: 828 - protein, 1108 aa, Bacillus thermoamylovorans
MATRSFILKIEPNEEVKKGLWKTHEVLNHGIAYYMNILKLIRQEAIYEHHEQDPKNPKKVSKAEIQAELWDFVLKMQKCNSFTHEVDKDVVFNILRELYEELVPSSVEKKGEANQLSNKFLYPLVDPNSQSGKGTASSGRKPRWYNLKIAGDPSWEEEKKKWEEDKKKDPLAKILGKLAEYGLIPLFIPFTDSNEPIVKEIKWMEKSRNQSVRRLDKDMFIQALERFLSWESWNLKVKEEYEKVEKEHKTLEERIKEDIQAFKSLEQYEKERQEQLLRDTLNTNEYRLSKRGLRGWREIIQKWLKMDENEPSEKYLEVFKDYQRKHPREAGDYSVYEFLSKKENHFIWRNHPEYPYLYATFCEIDKKKKDAKQQATFTLADPINHPLWVRFEERSGSNLNKYRILTEQLHTEKLKKKLTVQLDRLIYPTESGGWEEKGKVDIVLLPSRQFYNQIFLDIEEKGKHAFTYKDESIKFPLKGTLGGARVQFDRDHLRRYPHKVESGNVGRIYFNMTVNIEPTESPVSKSLKIHRDDFPKFVNFKPKELTEWIKDSKGKKLKSGIESLEIGLRVMSIDLGQRQAAAASIFEVVDQKPDIEGKLFFPIKGTELYAVHRASFNIKLPGETLVKSREVLRKAREDNLKLMNQKLNFLRNVLHFQQFEDITEREKRVTKWISRQENSDVPLVYQDELIQIRELMYKPYKDWVAFLKQLHKRLEVEIGKEVKHWRKSLSDGRKGLYGISLKNIDEIDRTRKFLLRWSLRPTEPGEVRRLEPGQRFAIDQLNHLNALKEDRLKKMANTIIMHALGYCYDVRKKKWQAKNPACQIILFEDLSNYNPYEERSRFENSKLMKWSRREIPRQVALQGEIYGLQVGEVGAQFSSRFHAKTGSPGIRCSVVTKEKLQDNRFFKNLQREGRLTLDKIAVLKEGDLYPDKGGEKFISLSKDRKLVTTHADINAAQNLQKRFWTRTHGFYKVYCKAYQVDGQTVYIPESKDQKQKIIEEFGEGYFILKDGVYEWGNAGKLKIKKGSSKQSSSELVDSDILKDSFDLASELKGEKLMLYRDPSGNVFPSDKWMAAGVFFGKLERILISKLTNQYSISTIEDDSSKQSM

SEQ ID NO: 829 - protein, 1108 aa, unknown
  Synthetic Sequence
MAIRSIKLKLKTHTGPEAQNLRKGIWRTHRLLNEGVAYYMKMLLLFRQESTGERPKEELQEELICHIREQQQRNQADKNTQALPLDKALEALRQLYELLVPSSVGQSGDAQIISRKFLSPLVDPNSEGGKGTSKAGAKPTWQKKKEANDPTWEQDYEKWKKRREEDPTASVITTLEEYGIRPIFPLYTNTVTDIAWLPLQSNQFVRTWDRDMLQQAIERLLSWESWNKRVQEEYAKLKEKMAQLNEQLEGGQEWISLLEQYEENRERELRENMTAANDKYRITKRQMKGWNELYELWSTFPASASHEQYKEALKRVQQRLRGRFGDAHFFQYLMEEKNRLIWKGNPQRIHYFVARNELTKRLEEAKQSATMTLPNARKHPLWVRFDARGGNLQDYYLTAEADKPRSRRFVTFSQLIWPSESGWMEKKDVEVELALSRQFYQQVKLLKNDKGKQKIEFKDKGSGSTFNGHLGGAKLQLERGDLEKEEKNFEDGEIGSVYLNVVIDFEPLQEVKNGRVQAPYGQVLQLIRRPNEFPKVTTYKSEQLVEWIKASPQHSAGVESLASGFRVMSIDLGLRAAAATSIFSVEESSDKNAADFSYWIEGTPLVAVHQRSYMLRLPGEQVEKQVMEKRDERFQLHQRVKFQIRVLAQIMRMANKQYGDRWDELDSLKQAVEQKKSPLDQTDRTFWEGIVCDLTKVLPRNEADWEQAVVQIHRKAEEYVGKAVQAWRKRFAADERKGIAGLSMWNIEELEGLRKLLISWSRRTRNPQEVNRFERGHTSHQRLLTHIQNVKEDRLKQLSHAIVMTALGYVYDERKQEWCAEYPACQVILFENLSQYRSNLDRSTKENSTLMKWAHRSIPKYVHMQAEPYGIQIGDVRAEYSSRFYAKTGTPGIRCKKVRGQDLQGRRFENLQKRLVNEQFLTEEQVKQLRPGDIVPDDSGELFMTLTDGSGSKEVVFLQADINAAHNLQKRFWQRYNELFKVSCRVIVRDEEEYLVPKTKSVQAKLGKGLFVKKSDTAWKDVYVWDSQAKLKGKTTFTEESESPEQLEDFQEIIEEAEEAKGTYRTLFRDPSGVFFPESVWYPQKDFWGEVKRKLYGKLRERFLTKAR

SEQ ID NO: 830 - protein, 658 aa, Methylobacterium nodulans
MLTKQDKQQKITYCTNMNEVFEAKLGSADLLLNWDHLRGRIRDRVDAGDIGSAFLKLALDVAHVLPDGVDDQLARAAFHFQSAKGAKSKHADSVQAGLRVLSIDLGVRSFATCSVFELKDTAPTTGVAFPLAEFRLWAVHERSFTLELPGENVGAAGQQWRAQADAELRQLRGGLNRHRQLLRAATVQKGERDAYLTDLREAWSAKELWPFEASLLSELERCSTVADPLWQDTCKRAARLYRTEFGAVVSEWRSRTRSREDRKYAGKSMWSVQHLTDVRRFLQSWSLAGRASGDIRRLDRERGGVFAKDLLDHIDALKDDRLKTGADLIVQAARGFQRNEFGYWVQKHAPCHVILFEDLSRYRMRTDRPRRENSQLMQWAHRGVPDMVGMQGEIYGIQDRRDPDSARKHARQPLAAFCLDTPAAFSSRYHASTMTPGIRCHPLRKREFEDQGFLELLKRENEGLDLNGYKPGDLVPLPGGEVFVCLNANGLSRIHADINAAQNLQRRFWTQHGDAFRLPCGKSAVQGQIRWAPLSMGKRQAGALGGFGYLEPTGHDSGSCQWRKTTEAEWRRLSGAQKDRDEAAAAEDEELQGLEEELLERSGERVVFFRDPSGVVLPTDLWFPSAAFWSIVRAKTVGRLRSHLDAQAEASYAVAAGL

SEQ ID NO: 831 - protein, 1302 aa, unknown
  Synthetic Sequence
MKKFELKQNFRNNYSGKTLRNFRQTLAQIANKKSSDSILTIKFKLDCSKTGKLPKYENLISLYDTIEDIKKGTLSYYLFTLIVSGFKFFGSASQAKAFSTKDIFKDNDFYNQFKIQSHLDLPDFVPSKIYQRLKKNVRSTNGKDNAFKASVIVAEYRKEIGKLKNKDESSEHQCEELFKKIGTALETRFSSWQDLINNCSTGCEIIDEILNDSFGTLPSIKKMVLASTTQSSDGEQDGIAIAYDPDSTFIKSDELLNPYFAVATILKSMPPEIQQDKKSAYVKANLTTPTHNALSWIFGKGLTLFQTESTEKLCAMFNVSDKRVIEQVQDAAKAVKLPAELDLNHCTLKFQDFRSSLGGHLDSWTTNYLKRLDELNDLLLNLPKNLSLPDIFMIDGKDFIEYSGCNRDEIQQMIDFVVNEQNRIKLQESLNALLGKGNNQICSDDISTVKDFSEIVNSLHSFVQQIDNSLEQSSNEANSIFSELKKKIEKNEKWDIWKNNLKKIPKLNKLSGGVPDAWKEIREIEQKFHEISENQKKHFTEVMEWIDAGNGTIDIFESRFKYDELLKKSKKNNLQSADELAFRSVLNKLGRFARQGNDLVCEKIKNWFKEQNIFDSSKDFNRYFINQKGFIFKHPSSKKDNSPYNLSANLLEKRYEVTNTVGALLEQCESDPAIVNDPFSMRSLVEFRALWFSINISGISKEQHIPTKIAQPKLDDSTYQESVSPTLKYRLEKEQITSSELNSIFTVYKSLLSGLSIRLSRNSFYLRTKFSWIGNNSLIYCPKETTWKIPAAYFKSDLWNEYKDKQILIVNEEYDVDVVKTFESVYKIVKSKDNNEKNRILPLLKQLPHDWMFKLPFGASNAEKCKVLKLEKNNKKFKPLSVSKDSLARLSGPSTYFNQIDEIMMNDESELSEMTLLADEPVRQQMSNGKIEIIPDDYVMSLAIPITRSLKKGNTESFPFKNIVSIDQGEAGFAYAVFKLSDCGNERAEPIATGLIPIPSIRRLIHSVKKYRGKKQRIQNFNQKFDSTMFTLRENVTGDICGLIVALMKKYNAFPILEKQVGNLESGSKQLMLVYKAVNSKFLAAKVDMQNDQRRSWWYQGNSWNTPILRISNPNQSNNKNIVKNINGKKYEELKIYPGYSVSAYMTSCICHVCGRNALELLKNDDSTGKVKKYQINQDGEVTIGGEVIKLYRKPDRLTPVKNLAKKGNRERTYASINERAPTVSVQKAELSADELQKIIKKNMRRAPRSLMSKDTTQSRYFCVFKNCPCHNKEQHADVNAAINIGRRFLKDCILDDNKEKD

SEQ ID NO: 832 - protein, 1255 aa, unknown
  Synthetic Sequence
MRSNYHGGRNARQWRKQISGLARRTKETVFTYKFPLETDAAEIDFDKAVQTYGIAEGVGHGSLIGLVCAFHLSGFRLFSKAGEAMAFRNRSRYPTDAFAEKLSAIMGIQLPTLSPEGLDLIFQSPPRSRDGIAPVWSENEVRNRLYTNWTGRGPANKPDEHLLEIAGEIAKQVFPKFGGWDDLASDPDKALAAADKYFQSQGDFPSIASLPAAIMLSPANSTVDFEGDYIAIDPAAETLLHQAVSRCAARLGRERPDLDQNKGPFVSSLQDALVSSQNNGLSWLFGVGFQHWKEKSPKELIDEYKVPADQHGAVTQVKSFVDAIPLNPLFDTTHYGEFRASVAGKVRSWVANYWKRLLDLKSLLATTEFTLPESISDPKAVSLFSGLLVDPQGLKKVADSLPARLVSAEEAIDRLMGVGIPTAADIAQVERVADEIGAFIGQVQQFNNQVKQKLENLQDADDEEFLKGLKIELPSGDKEPPAINRISGGAPDAAAEISELEEKLQRLLDARSEHFQTISEWAEENAVTLDPIAAMVELERLRLAERGATGDPEEYALRLLLQRIGRLANRVSPVSAGSIRELLKPVFMEEREFNLFFHNRLGSLYRSPYSTSRHQPFSIDVGKAKAIDWIAGLDQISSDIEKALSGAGEALGDQLRDWINLAGFAISQRLRGLPDTVPNALAQVRCPDDVRIPPLLAMLLEEDDIARDVCLKAFNLYVSAINGCLFGALREGFIVRTRFQRIGTDQIHYVPKDKAWEYPDRLNTAKGPINAAVSSDWIEKDGAVIKPVETVRNLSSTGFAGAGVSEYLVQAPHDWYTPLDLRDVAHLVTGLPVEKNITKLKRLTNRTAFRMVGASSFKTHLDSVLLSDKIKLGDFTIIIDQHYRQSVTYGGKVKISYEPERLQVEAAVPVVDTRDRTVPEPDTLFDHIVAIDLGERSVGFAVFDIKSCLRTGEVKPIHDNNGNPVVGTVAVPSIRRLMKAVRSHRRRRQPNQKVNQTYSTALQNYRENVIGDVCNRIDTLMERYNAFPVLEFQIKNFQAGAKQLEIVYGSVLHRYTFSGVDAHKAKRREYWYNGELWEHPYLMAKKWNEETNSMSGAPKPVSLFPGVTVNAARTSQICHQCQRNPMSHLRGLTGTIEISSDGLLELDDGTIRLFETSDYDEDKFKQSRREKRRLDANVLLSGRHRAEYIYTVAKRNLRRPPKNVMTKDTTQSRYTCLYKNCSWTGHADENAAINIGRRYLAERIDMPASKTKAAV

SEQ ID NO: 833 - protein, 1266 aa, unknown
  Synthetic Sequence
MRPRFHGGMNARDWRKHVGVLAQQHKETTRTYTFPLDTTGSAIDFDAALQAYNAVEGVGYGSLLGLACAVHLSGFRLFSTGKEAATFRNRARYPNAAFQAALRKELGTTITTLTPETLDRLFSSRPKRRNGVPLPWNQDSIRDRLYTNWVKPRPGDTPDAVLFQIATGIAQEITEDVSSWTDLAKNSDRGLKAAHRYFARVGGFPAFDNLTPPATVQPTDTTIDYDPNAPFHLVSHADQTLIHQSISLCAHRIRQEDPALDPNKSGFIKQLQNNFLSQTFYGLSWLFGAGYVHFRECTANDLAIQYGIPNNCRDGIHQIKSFADAILPNTFFEKKHYRKDSRSVGKKAKSWISNYWQRLLQLQTWVDDHTWVTLPQELTEAQFKPLFRGLLVDAVELMAIAERLPQRLADCRDSLDCLMGKGPQAATKNDVEIVEKVREEIESFVGQIEQLGNQLRHQLENENNDQVHRDNLHQLKNRLPLDLRRPQALNKISGGVPDVAKSIRGLETQLDQVLKERRSHFGRLTKWAKECGITLDPLQPLIESEKQRVAERGSAHDAKELAIRLLLQRIGRLGHRLSPTNATAIQELLRPVFAVKREFNLFFHNHMGALYRSPYSTSRHQPFQINVDVAHGTDWIGTIETLIQNLFTQIQDDALLRDLVQLEGFVFSHKLRALPGVIPSELARPNNLQQMGLPALLLVLLQADQVHRETVLRVFNLYGSAINGYLFQALRPGFIVRAGFQRLETKKLRYVPKAQSWQYPDRLHHAKSAIKNSLSAGWIKKNHQGAILPQKTLTALVKQKSLKDTGVPEYLVQAPHDWYVPIDLRGPAIPIEGLTVGTEGPELTQLGPMKDDCAFRAIGPSSFKSKIDAGLLPQDVKYGDMTLIFDQHYQQSISFANGTFSIQYQPTSLQVKAAIPVVDKRPRDTRNNSHLYDRIVAIDLGERKIGYAIFDLKQVLKSEQLEPMREDGKPLIGSISIRSIRGLMKAVQTHRNRRQPNYRIDQTYSKALMHYRESVIGDVCNAIDTLCARYGGFPVLESSVRNFEVGSAQLKTVYGSVSRRYTWSAVDAHKNQRQQYWLGGTKDKIPIWTHPYLMTREWDEKNSKWSNRSKPLKMHPGVEVHPAGTSQICHQCKRNPIGALWNVADTVVLDDQGQLDLDDGTIRLNSGYIDTTEIKRARRKKIRLPENKPLTGSHKTSHVRAVARRNLRQPPKSTRAKDTTQSRYTCLYVDCGHECHADENAAINIGRKYLQERIHIEASRQALSTR

SEQ ID NO: 834 - protein, 1269 aa, unknown
  Synthetic Sequence
MVAGLKKIKRDGVTMKSNYHGGVKARAWRKRIGGLARRQKETVFTYKFPLETEEAGIDFDKAVQTYGIAEGISQGSLIGLVCAFHLSGFRLFSKADETKAFCNQGRYPNQAFAEKLRNELSVTLPKLSPQSLDVLFQSSPKSKNGVAPEWSKNAIRNRLYTNWTGKGAGTNPDEHLLEIAEDIAAEIDSDLDGWKDLEEHPEKGLSAADRYFQAQGDFPSLTGLPPSVPLTPQNSTVAFEGDPVCLNPSDNTLLHQAVARCAGRILQEQPNLSPDKNRFINQLQDELVSSQNNGLSWLFGVGFKYWKEMSVDQLADDYKVKSTDLDALKQVKSFIDAIPLNPLFDTPHYGEFRASVAGKMRSWVKNYWKRLLDLKSQLGTANINLPEGLDEQRAENLFSGLLIDSKGLRQVTDKLPSRLKKAEDTIDRLMGDGNPTSDDIEQVETVAAEISAFIGQVEQFNNQLEQRLENPLEGDDETFLKQLKIDLPAEFKKPPAINRISGGSPDPTAEIAELEEKLDRLMSARKEHYETIAEWASANKVTLDPMEAMTTLEAQRLTERGAEGDQEEFALRLLLQRIGRLANRLSPQGATAIRDLLRPVFTEKREFNLFFHNRMGSLYRSPYSTSRHQPFTIDVAVAKNTDWMDALDGIAETIMKGLSQAGDELSLRLRDWINISGFSLSQRLRGLPDTVPGELALVRSADDVRIPPMLALQLEEDEVSREVCLKAFNLYVSAINGCLFRALREGFIVRTKFQRLERDVLSYVPKTKLWNYPQRLDTARGPIHSALAAAWINKEGSVIDPVETVTALSDTGFSDDGIPEYLVQAPHDWYTPIDLRDISKPVSGLPVKKNITGLKRQKKQTAFRMVGPSSFKSHLDSTLLSEEVKLGDFTLIFDQYYKQRVSYNGRVKITFEPDRLHVEAAVPVIDKRVRPSTEEDALFDHLLAIDLGEKRVGYAVYDIKACLRTGDIKPLEDGDGKPIVGSVAVPSIRRLMKAVRSHRQQRQPNQKVNQTYSTALMNYRENVIGDVCNRIDTLMEKYNAFPVLESSVMNFEAGSRQLEMVYGSVLHRYTYSKIDAHTAKRKEYWYTGEYWDHPYLMAHKWNERTRSYSGSLSALTLYPGVMVHPAGTSQRCHQCKRNPMVEIKQLTGQVEINADGSLELDDGTICLYEGYDYSPEEYKKAKREKRRLDPNVPLSGRHQAKHVSAVAKRNLRRPTVSMMSGDTTQARYVCLYTDCDFTGHADENAAINIGWKYLTERIALSESKDKAGV

SEQ ID NO: 835 - protein, 1340 aa, unknown
  Synthetic Sequence
MQISKVNHKHVAVGQKDRERITGFIYNDPVGDEKSLEDVVAKRANDTKVLFNVFNTKDLYDSQESDKSEKDKEIISKGAKFVAKSFNSAITILKKQNKIYSTLTSQQVIKELKDKFGGARIYDDDIEEALTETLKKSFRKENVRNSIKVLIENAAGIRSSLSKDEEELIQEYFVKQLVEEYTKTKLQKNVVKSIKNQNMVIQPDSDSQVLSLSESRREKQSSAVSSDTLVNCKEKDVLKAFLTDYAVLDEDERNSLLWKLRNLVNLYFYGSESIRDYSYTKEKSVWKEHDEQKANKTLFIDEICHITKIGKNGKEQKVLDYEENRSRCRKQNINYYRSALNYAKNNTSGIFENEDSNHFWIHLIENEVERLYNGIENGEEFKFETGYISEKVWKAVINHLSIKYIALGKAVYNYAMKELSSPGDIEPGKIDDSYINGITSFDYEIIKAEESLQRDISMNVVFATNYLACATVDTDKDFLLFSKEDIRSCTKKDGNLCKNIMQFWGGYSTWKNFCEEYLKDDKDALELLYSLKSMLYSMRNSSFHFSTENVDNGSWDTELIGKLFEEDCNRAARIEKEKFYNNNLHMFYSSSLLEKVLERLYSSHHERASQVPSFNRVFVRKNFPSSLSEQRITPKFTDSKDEQIWQSAVYYLCKEIYYNDFLQSKEAYKLFREGVKNLDKNDINNQKAADSFKQAVVYYGKAIGNATLSQVCQAIMTEYNRQNNDGLKKKSAYAEKQNSNKYKHYPLFLKQVLQSAFWEYLDENKEIYGFISAQIHKSNVEIKAEDFIANYSSQQYKKLVDKVKKTPELQKWYTLGRLINPRQANQFLGSIRNYVQFVKDIQRRAKENGNPIRNYYEVLESDSIIKILEMCTKLNGTTSNDIHDYFRDEDEYAEYISQFVNFGDVHSGAALNAFCNSESEGKKNGIYYDGINPIVNRNWVLCKLYGSPDLISKIISRVNENMIHDFHKQEDLIREYQIKGICSNKKEQQDLRTFQVLKNRVELRDIVEYSEIINELYGQLIKWCYLRERDLMYFQLGFHYLCLNNASSKEADYIKINVDDRNISGAILYQIAAMYINGLPVYYKKDDMYVALKSGKKASDELNSNEQTSKKINYFLKYGNNILGDKKDQLYLAGLELFENVAEHENIIIFRNEIDHFHYFYDRDRSMLDLYSEVFDRFFTYDMKLRKNVVNMLYNILLDHNIVSSFVFETGEKKVGRGDSEVIKPSAKIRLRANNGVSSDVFTYKVGSKDELKIATLPAKNEEFLLNVARLIYYPDMEAVSENMVREGVVKVEKSNDKKGKISRGSNTRSSNQSKYNNKSKNRMNYSMGSIFEKMDLKFD

SEQ ID NO: 836 - protein, 1437 aa, unknown
  Synthetic Sequence
MKISKVREENRGAKLTVNAKTAVVSENRSQEGILYNDPSRYGKSRKNDEDRDRYIESRLKSSGKLYRIFNEDKNKRETDELQWFLSEIVKKINRRNGLVLSDMLSVDDRAFEKAFEKYAELSYTNRRNKVSGSPAFETCGVDAATAERLKGIISETNFINRIKNNIDNKVSEDIIDRIIAKYLKKSLCRERVKRGLKKLLMNAFDLPYSDPDIDVQRDFIDYVLEDFYHVRAKSQVSRSIKNMNMPVQPEGDGKFAITVSKGGTESGNKRSAEKEAFKKFLSDYASLDERVRDDMLRRMRRLVVLYFYGSDDSKLSDVNEKFDVWEDHAARRVDNREFIKLPLENKLANGKTDKDAERIRKNTVKELYRNQNIGCYRQAVKAVEEDNNGRYFDDKMLNMFFIHRIEYGVEKIYANLKQVTEFKARTGYLSEKIWKDLINYISIKYIAMGKAVYNYAMDELNASDKKEIELGKISEEYLSGISSFDYELIKAEEMLQRETAVYVAFAARHLSSQTVELDSENSDFLLLKPKGTMDKNDKNKLASNNILNFLKDKETLRDTILQYFGGHSLWTDFPFDKYLAGGKDDVDFLTDLKDVIYSMRNDSFHYATENHNNGKWNKELISAMFEHETERMTVVMKDKFYSNNLPMFYKNDDLKKLLIDLYKDNVERASQVPSFNKVFVRKNFPALVRDKDNLGIELDLKADADKGENELKFYNALYYMFKEIYYNAFLNDKNVRERFITKATKVADNYDRNKERNLKDRIKSAGSDEKKKLREQLQNYIAENDFGQRIKNIVQVNPDYTLAQICQLIMTEYNQQNNGCMQKKSAARKDINKDSYQHYKMLLLVNLRKAFLEFIKENYAFVLKPYKHDLCDKADFVPDFAKYVKPYAGLISRVAGSSELQKWYIVSRFLSPAQANHMLGFLHSYKQYVWDIYRRASETGTEINHSIAEDKIAGVDITDVDAVIDLSVKLCGTISSEISDYFKDDEVYAEYISSYLDFEYDGGNYKDSLNRFCNSDAVNDQKVALYYDGEHPKLNRNIILSKLYGERRFLEKITDRVSRSDIVEYYKLKKETSQYQTKGIFDSEDEQKNIKKFQEMKNIVEFRDLMDYSEIADELQGQLINWIYLRERDLMNFQLGYHYACLNNDSNKQATYVTLDYQGKKNRKINGAILYQICAMYINGLPLYYVDKDSSEWTVSDGKESTGAKIGEFYRYAKSFENTSDCYASGLEIFENISEHDNITELRNYIEHFRYYSSFDRSFLGIYSEVFDRFFTYDLKYRKNVPTILYNILLQHFVNVRFEFVSGKKMIGIDKKDRKIAKEKECARITIREKNGVYSEQFTYKLKNGTVYVDARDKRYLQSIIRLLFYPEKVNMDEMIEVKEKKKPSDNNTGKGYSKRDRQQDRKEYDKYKEKKKKEGNFLSGMGGNINWDEINAQLKN

SEQ ID NO: 837 - protein, 1385 aa, Clostridium aminophilum
MKFSKVDHTRSAVGIQKATDSVHGMLYTDPKKQEVNDLDKRFDQLNVKAKRLYNVFNQSKAEEDDDEKRFGKVVKKLNRELKDLLFHREVSRYNSIGNAKYNYYGIKSNPEEIVSNLGMVESLKGERDPQKVISKLLLYYLRKGLKPGTDGLRMILEASCGLRKLSGDEKELKVFLQTLDEDFEKKTFKKNLIRSIENQNMAVQPSNEGDPIIGITQGRFNSQKNEEKSAIERMMSMYADLNEDHREDVLRKLRRLNVLYFNVDTEKTEEPTLPGEVDTNPVFEVWHDHEKGKENDRQFATFAKILTEDRETRKKEKLAVKEALNDLKSAIRDHNIMAYRCSIKVTEQDKDGLFFEDQRINRFWIHHIESAVERILASINPEKLYKLRIGYLGEKVWKDLLNYLSIKYIAVGKAVFHFAMEDLGKTGQDIELGKLSNSVSGGLTSFDYEQIRADETLQRQLSVEVAFAANNLFRAVVGQTGKKIEQSKSEENEEDFLLWKAEKIAESIKKEGEGNTLKSILQFFGGASSWDLNHFCAAYGNESSALGYETKFADDLRKAIYSLRNETFHFTTLNKGSFDWNAKLIGDMFSHEAATGIAVERTRFYSNNLPMFYRESDLKRIMDHLYNTYHPRASQVPSFNSVFVRKNFRLFLSNTLNTNTSFDTEVYQKWESGVYYLFKEIYYNSFLPSGDAHHLFFEGLRRIRKEADNLPIVGKEAKKRNAVQDFGRRCDELKNLSLSAICQMIMTEYNEQNNGNRKVKSTREDKRKPDIFQHYKMLLLRTLQEAFAIYIRREEFKFIFDLPKTLYVMKPVEEFLPNWKSGMFDSLVERVKQSPDLQRWYVLCKFLNGRLLNQLSGVIRSYIQFAGDIQRRAKANHNRLYMDNTQRVEYYSNVLEVVDFCIKGTSRFSNVFSDYFRDEDAYADYLDNYLQFKDEKIAEVSSFAALKTFCNEEEVKAGIYMDGENPVMQRNIVMAKLFGPDEVLKNVVPKVTREEIEEYYQLEKQIAPYRQNGYCKSEEDQKKLLRFQRIKNRVEFQTITEFSEIINELLGQLISWSFLRERDLLYFQLGFHYLCLHNDTEKPAEYKEISREDGTVIRNAILHQVAAMYVGGLPVYTLADKKLAAFEKGEADCKLSISKDTAGAGKKIKDFFRYSKYVLIKDRMLTDQNQKYTIYLAGLELFENTDEHDNITDVRKYVDHFKYYATSDENAMSILDLYSEIHDRFFTYDMKYQKNVANMLENILLRHFVLIRPEFFTGSKKVGEGKKITCKARAQIEIAENGMRSEDFTYKLSDGKKNISTCMIAARDQKYLNTVARLLYYPHEAKKSIVDTREKKNNKKTNRGDGTFNKQKGTARKEKDNGPREFNDTGFSNTPFAGFDPFRNS

SEQ ID NO: 838 - protein, 1334 aa, unknown
  Synthetic Sequence
MKISKVDHTRMAVAKGNQHRRDEISGILYKDPTKTGSIDFDERFKKLNCSAKILYHVFNGIAEGSNKYKNIVDKVNNNLDRVLFTGKSYDRKSIIDIDTVLRNVEKINAFDRISTEEREQIIDDLLEIQLRKGLRKGKAGLREVLLIGAGVIVRTDKKQEIADFLEILDEDFNKTNQAKNIKLSIENQGLVVSPVSRGEERIFDVSGAQKGKSSKKAQEKEALSAFLLDYADLDKNVRFEYLRKIRRLINLYFYVKNDDVMSLTEIPAEVNLEKDFDIWRDHEQRKEENGDFVGCPDILLADRDVKKSNSKQVKIAERQLRESIREKNIKRYRFSIKTIEKDDGTYFFANKQISVFWIHRIENAVERILGSINDKKLYRLRLGYLGEKVWKDILNFLSIKYIAVGKAVFNFAMDDLQEKDRDIEPGKISENAVNGLTSFDYEQIKADEMLQREVAVNVAFAANNLARVTVDIPQNGEKEDILLWNKSDIKKYKKNSKKGILKSILQFFGGASTWNMKMFEIAYHDQPGDYEENYLYDIIQIIYSLRNKSFHFKTYDHGDKNWNRELIGKMIEHDAERVISVEREKFHSNNLPMFYKDADLKKILDLLYSDYAGRASQVPAFNTVLVRKNFPEFLRKDMGYKVHFNNPEVENQWHSAVYYLYKEIYYNLFLRDKEVKNLFYTSLKNIRSEVSDKKQKLASDDFASRCEEIEDRSLPEICQIIMTEYNAQNFGNRKVKSQRVIEKNKDIFRHYKMLLIKTLAGAFSLYLKQERFAFIGKATPIPYETTDVKNFLPEWKSGMYASFVEEIKNNLDLQEWYIVGRFLNGRMLNQLAGSLRSYIQYAEDIERRAAENRNKLFSKPDEKIEACKKAVRVLDLCIKISTRISAEFTDYFDSEDDYADYLEKYLKYQDDAIKELSGSSYAALDHFCNKDDLKFDIYVNAGQKPILQRNIVMAKLFGPDNILSEVMEKVTESAIREYYDYLKKVSGYRVRGKCSTEKEQEDLLKFQRLKNAVEFRDVTEYAEVINELLGQLISWSYLRERDLLYFQLGFHYMCLKNKSFKPAEYVDIRRNNGTIIHNAILYQIVSMYINGLDFYSCDKEGKTLKPIETGKGVGSKIGQFIKYSQYLYNDPSYKLEIYNAGLEVFENIDEHDNITDLRKYVDHFKYYAYGNKMSLLDLYSEFFDRFFTYDMKYQKNVVNVLENILLRHFVIFYPKFGSGKKDVGIRDCKKERAQIEISEQSLTSEDFMFKLDDKAGEEAKKFPARDERYLQTIAKLLYYPNEIEDMNRFMKKGETINKKVQFNRKKKITRKQKNNSSNEVLSSTMGYLFKNIKL

SEQ ID NO: 839 - protein, 1175 aa, Carnobacterium gallinarum
MRITKVKIKLDNKLYQVTMQKEEKYGTLKLNEESRKSTAEILRLKKASFNKSFHSKTINSQKENKNATIKKNGDYISQIFEKLVGVDTNKNIRKPKMSLTDLKDLPKKDLALFIKRKFKNDDIVEIKNLDLISLFYNALQKVPGEHFTDESWADFCQEMMPYREYKNKFIERKIILLANSIEQNKGFSINPETFSKRKRVLHQWAIEVQERGDFSILDEKLSKLAEIYNFKKMCKRVQDELNDLEKSMKKGKNPEKEKEAYKKQKNFKIKTIWKDYPYKTHIGLIEKIKENEELNQFNIEIGKYFEHYFPIKKERCTEDEPYYLNSETIATTVNYQLKNALISYLMQIGKYKQFGLENQVLDSKKLQEIGIYEGFQTKFMDACVFATSSLKNIIEPMRSGDILGKREFKEAIATSSFVNYHHFFPYFPFELKGMKDRESELIPFGEQTEAKQMQNIWALRGSVQQIRNEIFHSFDKNQKFNLPQLDKSNFEFDASENSTGKSQSYIETDYKFLFEAEKNQLEQFFIERIKSSGALEYYPLKSLEKLFAKKEMKFSLGSQVVAFAPSYKKLVKKGHSYQTATEGTANYLGLSYYNRYELKEESFQAQYYLLKLIYQYVFLPNFSQGNSPAFRETVKAILRINKDEARKKMKKNKKFLRKYAFEQVREMEFKETPDQYMSYLQSEMREEKVRKAEKNDKGFEKNITMNFEKLLMQIFVKGFDVFLTTFAGKELLLSSEEKVIKETEISLSKKINEREKTLKASIQVEHQLVATNSAISYWLFCKLLDSRHLNELRNEMIKFKQSRIKFNHTQHAELIQNLLPIVELTILSNDYDEKNDSQNVDVSAYFEDKSLYETAPYVQTDDRTRVSFRPILKLEKYHTKSLIEALLKDNPQFRVAATDIQEWMHKREEIGELVEKRKNLHTEWAEGQQTLGAEKREEYRDYCKKIDRFNWKANKVTLTYLSQLHYLITDLLGRMVGFSALFERDLVYFSRSFSELGGETYHISDYKNLSGVLRLNAEVKPIKIKNIKVIDNEENPYKGNEPEVKPFLDRLHAYLENVIGIKAVHGKIRNQTAHLSVLQLELSMIESMNNLRDLMAYDRKLKNAVTKSMIKILDKHGMILKLKIDENHKNFEIESLIPKEIIHLKDKAIKTNQVSEEYCQLVLALLTTNPGNQLN

SEQ ID NO: 840 - protein, 1154 aa, Paludibacter propionicigenes
MRVSKVKVKDGGKDKMVLVHRKTTGAQLVYSGQPVSNETSNILPEKKRQSFDLSTLNKTIIKFDTAKKQKLNVDQYKIVEKIFKYPKQELPKQIKAEEILPFLNHKFQEPVKYWKNGKEESFNLTLLIVEAVQAQDKRKLQPYYDWKTWYIQTKSDLLKKSIENNRIDLTENLSKRKKALLAWETEFTASGSIDLTHYHKVYMTDVLCKMLQDVKPLTDDKGKINTNAYHRGLKKALQNHQPAIFGTREVPNEANRADNQLSIYHLEVVKYLEHYFPIKTSKRRNTADDIAHYLKAQTLKTTIEKQLVNAIRANIIQQGKTNHHELKADTTSNDLIRIKTNEAFVLNLTGTCAFAANNIRNMVDNEQTNDILGKGDFIKSLLKDNTNSQLYSFFFGEGLSTNKAEKETQLWGIRGAVQQIRNNVNHYKKDALKTVFNISNFENPTITDPKQQTNYADTIYKARFINELEKIPEAFAQQLKTGGAVSYYTIENLKSLLTTFQFSLCRSTIPFAPGFKKVFNGGINYQNAKQDESFYELMLEQYLRKENFAEESYNARYFMLKLIYNNLFLPGFTTDRKAFADSVGFVQMQNKKQAEKVNPRKKEAYAFEAVRPMTAADSIADYMAYVQSELMQEQNKKEEKVAEETRINFEKFVLQVFIKGFDSFLRAKEFDFVQMPQPQLTATASNQQKADKLNQLEASITADCKLTPQYAKADDATHIAFYVFCKLLDAAHLSNLRNELIKFRESVNEFKFHHLLEIIEICLLSADVVPTDYRDLYSSEADCLARLRPFIEQGADITNWSDLFVQSDKHSPVIHANIELSVKYGTTKLLEQIINKDTQFKTTEANFTAWNTAQKSIEQLIKQREDHHEQWVKAKNADDKEKQERKREKSNFAQKFIEKHGDDYLDICDYINTYNWLDNKMHFVHLNRLHGLTIELLGRMAGFVALFDRDFQFFDEQQIADEFKLHGFVNLHSIDKKLNEVPTKKIKEIYDIRNKIIQINGNKINESVRANLIQFISSKRNYYNNAFLHVSNDEIKEKQMYDIRNHIAHFNYLTKDAADFSLIDLINELRELLHYDRKLKNAVSKAFIDLFDKHGMILKLKLNADHKLKVESLEPKKIYHLGSSAKDKPEYQYCTNQVMMAYCNMCRSLLEMKK

SEQ ID NO: 841 - protein, 1120 aa, Listeria seeligeri
MWISIKTLIHHLGVLFFCDYMYNRREKKIIEVKTMRITKVEVDRKKVLISRDKNGGKLVYENEMQDNTEQIMHHKKSSFYKSVVNKTICRPEQKQMKKLVHGLLQENSQEKIKVSDVTKLNISNFLNHRFKKSLYYFPENSPDKSEEYRIEINLSQLLEDSLKKQQGTFICWESFSKDMELYINWAENYISSKTKLIKKSIRNNRIQSTESRSGQLMDRYMKDILNKNKPFDIQSVSEKYQLEKLTSALKATFKEAKKNDKEINYKLKSTLQNHERQIIEELKENSELNQFNIEIRKHLETYFPIKKTNRKVGDIRNLEIGEIQKIVNHRLKNKIVQRILQEGKLASYEIESTVNSNSLQKIKIEEAFALKFINACLFASNNLRNMVYPVCKKDILMIGEFKNSFKEIKHKKFIRQWSQFFSQEITVDDIELASWGLRGAIAPIRNEIIHLKKHSWKKFFNNPTFKVKKSKIINGKTKDVTSEFLYKETLFKDYFYSELDSVPELIINKMESSKILDYYSSDQLNQVFTIPNFELSLLTSAVPFAPSFKRVYLKGFDYQNQDEAQPDYNLKLNIYNEKAFNSEAFQAQYSLFKMVYYQVFLPQFTTNNDLFKSSVDFILTLNKERKGYAKAFQDIRKMNKDEKPSEYMSYIQSQLMLYQKKQEEKEKINHFEKFINQVFIKGFNSFIEKNRLTYICHPTKNTVPENDNIEIPFHTDMDDSNIAFWLMCKLLDAKQLSELRNEMIKFSCSLQSTEEISTFTKAREVIGLALLNGEKGCNDWKELFDDKEAWKKNMSLYVSEELLQSLPYTQEDGQTPVINRSIDLVKKYGTETILEKLFSSSDDYKVSAKDIAKLHEYDVTEKIAQQESLHKQWIEKPGLARDSAWTKKYQNVINDISNYQWAKTKVELTQVRHLHQLTIDLLSRLAGYMSIADRDFQFSSNYILERENSEYRVTSWILLSENKNKNKYNDYELYNLKNASIKVSSKNDPQLKVDLKQLRLTLEYLELFDNRLKEKRNNISHFNYLNGQLGNSILELFDDARDVLSYDRKLKNAVSKSLKEILSSHGMEVTFKPLYQTNHHLKIDKLQPKKIHHLGEKSTVSSNQVSNEYCQLVRTLLTMK

SEQ ID NO: 842 - protein, 1051 aa, Listeria newyorkensis
MKITKMRVDGRTIVMERTSKEGQLGYEGIDGNKTTEIIFDKKKESFYKSILNKTVRKPDEKEKNRRKQAINKAINKEITELMLAVLHQEVPSQKLHNLKSLNTESLTKLFKPKFQNMISYPPSKGAEHVQFCLTDIAVPAIRDLDEIKPDWGIFFEKLKPYTDWAESYIHYKQTTIQKSIEQNKIQSPDSPRKLVLQKYVTAFLNGEPLGLDLVAKKYKLADLAESFKLVDLNEDKSANYKIKACLQQHQRNILDELKEDPELNQYGIEVKKYIQRYFPIKRAPNRSKHARADFLKKELIESTVEQQFKNAVYHYVLEQGKMEAYELTDPKTKDLQDIRSGEAFSFKFINACAFASNNLKMILNPECEKDILGKGNFKKNLPNSTTRSDVVKKMIPFFSDELQNVNFDEAIWAIRGSIQQIRNEVYHCKKHSWKSILKIKGFEFEPNNMKYADSDMQKLMDKDIAKIPEFIEEKLKSSGVVRFYRHDELQSIWEMKQGFSLLTTNAPFVPSFKRVYAKGHDYQTSKNRYYNLDLTTFDILEYGEEDFRARYFLTKLVYYQQFMPWFTADNNAFRDAANFVLRLNKNRQQDAKAFINIREVEEGEMPRDYMGYVQGQIAIHEDSIEDTPNHFEKFISQVFIKGFDRHMRSANLKFIKNPRNQGLEQSEIEEMSFDIKVEPSFLKNKDDYIAFWIFCKMLDARHLSELRNEMIKYDGHLTGEQEIIGLALLGVDSRENDWKQFFSSEREYEKIMKGYVVEELYQREPYRQSDGKTPILFRGVEQARKYGTETVIQRLFDANPEFKVSKCNLAEWERQKETIEETIKRRKELHNEWAKNPKKPQNNAFFKEYKECCDAIDAYNWHKNKTTLAYVNELHHLLIEILGRYVGYVAIADRDFQCMANQYFKHSGITERVEYWGDNRLKSIKKLDTFLKKEGLFVSEKNARNHIAHLNYLSLKSECTLLYLSERLREIFKYDRKLKNAVSKSLIDILDRHGMSVVFANLKENKHRLVIKSLEPKKLRHLGGKKIDGGYIETNQVSEEYCGIVKRLLEM

SEQ ID NO: 843 - protein, 1182 aa, Leptotrichia wadei
MYMKITKIDGVSHYKKQDKGILKKKWKDLDERKQREKIEARYNKQIESKIYKEFFRLKNKKRIEKEEDQNIKSLYFFIKELYLNEKNEEWELKNINLEILDDKERVIKGYKFKEDVYFFKEGYKEYYLRILFNNLIEKVQNENREKVRKNKEFLDLKEIFKKYKNRKIDLLLKSINNNKINLEYKKENVNEEIYGINPTNDREMTFYELLKEIIEKKDEQKSILEEKLDNFDITNFLENIEKIFNEETEINIIKGKVLNELREYIKEKEENNSDNKLKQIYNLELKKYIENNFSYKKQKSKSKNGKNDYLYLNFLKKIMFIEEVDEKKEINKEKFKNKINSNFKNLFVQHILDYGKLLYYKENDEYIKNTGQLETKDLEYIKTKETLIRKMAVLVSFAANSYYNLFGRVSGDILGTEVVKSSKTNVIKVGSHIFKEKMLNYFFDFEIFDANKIVEILESISYSIYNVRNGVGHFNKLILGKYKKKDINTNKRIEEDLNNNEEIKGYFIKKRGEIERKVKEKFLSNNLQYYYSKEKIENYFEVYEFEILKRKIPFAPNFKRIIKKGEDLFNNKNNKKYEYFKNFDKNSAEEKKEFLKTRNFLLKELYYNNFYKEFLSKKEEFEKIVLEVKEEKKSRGNINNKKSGVSFQSIDDYDTKINISDYIASIHKKEMERVEKYNEEKQKDTAKYIRDFVEEIFLTGFINYLEKDKRLHFLKEEFSILCNNNNNVVDFNININEEKIKEFLKENDSKTLNLYLFFNMIDSKRISEFRNELVKYKQFTKKRLDEEKEFLGIKIELYETLIEFVILTREKLDTKKSEEIDAWLVDKLYVKDSNEYKEYEEILKLFVDEKILSSKEAPYYATDNKTPILLSNFEKTRKYGTQSFLSEIQSNYKYSKVEKENIEDYNKKEEIEQKKKSNIEKLQDLKVELHKKWEQNKITEKEIEKYNNTTRKINEYNYLKNKEELQNVYLLHEMLSDLLARNVAFFNKWERDFKFIVIAIKQFLRENDKEKVNEFLNPPDNSKGKKVYFSVSKYKNTVENIDGIHKNFMNLIFLNNKFMNRKIDKMNCAIWVYFRNYIAHFLHLHTKNEKISLISQMNLLIKLFSYDKKVQNHILKSTKTLLEKYNIQINFEISNDKNEVFKYKIKNRLYSKKGKMLGKNNKFEILENEFLENVKAMLEYSE

SEQ ID NO: 844 - protein, 1285 aa, Rhodobacter capsulatus
MQIGKVQGRTISEFGDPAGGLKRKISTDGKNRKELPAHLSSDPKALIGQWISGIDKIYRKPDSRKSDGKAIHSPTPSKMQFDARDDLGEAFWKLVSEAGLAQDSDYDQFKRRLHPYGDKFQPADSGAKLKFEADPPEPQAFHGRWYGAMSKRGNDAKELAAALYEHLHVDEKRIDGQPKRNPKTDKFAPGLVVARALGIESSVLPRGMARLARNWGEEEIQTYFVVDVAASVKEVAKAAVSAAQAFDPPRQVSGRSLSPKVGFALAEHLERVTGSKRCSFDPAAGPSVLALHDEVKKTYKRLCARGKNAARAFPADKTELLALMRHTHENRVRNQMVRMGRVSEYRGQQAGDLAQSHYWTSAGQTEIKESEIFVRLWVGAFALAGRSMKAWIDPMGKIVNTEKNDRDLTAAVNIRQVISNKEMVAEAMARRGIYFGETPELDRLGAEGNEGFVFALLRYLRGCRNQTFHLGARAGFLKEIRKELEKTRWGKAKEAEHVVLTDKTVAAIRAIIDNDAKALGARLLADLSGAFVAHYASKEHFSTLYSEIVKAVKDAPEVSSGLPRLKLLLKRADGVRGYVHGLRDTRKHAFATKLPPPPAPRELDDPATKARYIALLRLYDGPFRAYASGITGTALAGPAARAKEAATALAQSVNVTKAYSDVMEGRSSRLRPPNDGETLREYLSALTGETATEFRVQIGYESDSENARKQAEFIENYRRDMLAFMFEDYIRAKGFDWILKIEPGATAMTRAPVLPEPIDTRGQYEHWQAALYLVMHFVPASDVSNLLHQLRKWEALQGKYELVQDGDATDQADARREALDLVKRFRDVLVLFLKTGEARFEGRAAPFDLKPFRALFANPATFDRLFMATPTTARPAEDDPEGDGASEPELRVARTLRGLRQIARYNHMAVLSDLFAKHKVRDEEVARLAEIEDETQEKSQIVAAQELRTDLHDKVMKCHPKTISPEERQSYAAAIKTIEEHRFLVGRVYLGDHLRLHRLMMDVIGRLIDYAGAYERDTGTFLINASKQLGAGADWAVTIAGAANTDARTQTRKDLAHFNVLDRADGTPDLTALVNRAREMMAYDRKRKNAVPRSILDMLARLGLTLKWQMKDHLLQDATITQAAIKHLDKVRLTVGGPAAVTEARFSQDYLQMVAAVFNGSVQNPKPRRRDDGDAWHKPPKPATAQSQPDQKPPNKAPSAGSRLPPPQVGEVYEGVVVKVIDTGSLGFLAVEGVAGNIGLHISRLRRIREDAIIVGRRYRFRVEIYVPPKSNTSKLNAADLVRID

SEQ ID NO: 845 - protein, 1159 aa, Leptotrichia buccalis
MKVTKVGGISHKKYTSEGRLVKSESEENRTDERLSALLNMRLDMYIKNPSSTETKENQKRIGKLKKFFSNKMVYLKDNTLSLKNGKKENIDREYSETDILESDVRDKKNFAVLKKIYLNENVNSEELEVFRNDIKKKLNKINSLKYSFEKNKANYQKINENNIEKVEGKSKRNIIYDYYRESAKRDAYVSNVKEAFDKLYKEEDIAKLVLEIENLTKLEKYKIREFYHEIIGRKNDKENFAKIIYEEIQNVNNMKELIEKVPDMSELKKSQVFYKYYLDKEELNDKNIKYAFCHFVEIEMSQLLKNYVYKRLSNISNDKIKRIFEYQNLKKLIENKLLNKLDTYVRNCGKYNYYLQDGEIATSDFIARNRQNEAFLRNIIGVSSVAYFSLRNILETENENDITGRMRGKTVKNNKGEEKYVSGEVDKIYNENKKNEVKENLKMFYSYDFNMDNKNEIEDFFANIDEAISSIRHGIVHFNLELEGKDIFAFKNIAPSEISKKMFQNEINEKKLKLKIFRQLNSANVFRYLEKYKILNYLKRTRFEFVNKNIPFVPSFTKLYSRIDDLKNSLGIYWKTPKTNDDNKTKEIIDAQIYLLKNIYYGEFLNYFMSNNGNFFEISKEIIELNKNDKRNLKTGFYKLQKFEDIQEKIPKEYLANIQSLYMINAGNQDEEEKDTYIDFIQKIFLKGFMTYLANNGRLSLIYIGSDEETNTSLAEKKQEFDKFLKKYEQNNNIKIPYEINEFLREIKLGNILKYTERLNMFYLILKLLNHKELTNLKGSLEKYQSANKEEAFSDQLELINLLNLDNNRVTEDFELEADEIGKFLDFNGNKVKDNKELKKFDTNKIYFDGENIIKHRAFYNIKKYGMLNLLEKIADKAGYKISIEELKKYSNKKNEIEKNHKMQENLHRKYARPRKDEKFTDEDYESYKQAIENIEEYTHLKNKVEFNELNLLQGLLLRILHRLVGYTSIWERDLRFRLKGEFPENQYIEEIFNFENKKNVKYKGGQIVEKYIKFYKELHQNDEVKINKYSSANIKVLKQEKKDLYIRNYIAHFNYIPHAEISLLEVLENLRKLLSYDRKLKNAVMKSVVDILKEYGFVATFKIGADKKIGIQTLESEKIVHLKNLKKKKLMTDRNSEELCKLVKIMFEYKMEEKKSEN

SEQ ID NO: 846 - protein, 1389 aa, Leptotrichia shahii
MGNLFGHKRWYEVRDKKDFKIKRKVKVKRNYDGNKYILNINENNNKEKIDNNKFIRKYINYKKNDNILKEFTRKFHAGNILFKLKGKEGIIRIENNDDFLETEEVVLYIEAYGKSEKLKALGITKKKIIDEAIRQGITKDDKKIEIKRQENEEEIEIDIRDEYTNKTLNDCSIILRIIENDELETKKSIYEIFKNINMSLYKIIEKIIENETEKVFENRYYEEHLREKLLKDDKIDVILTNFMEIREKIKSNLEILGFVKFYLNVGGDKKKSKNKKMLVEKILNINVDLTVEDIADFVIKELEFWNITKRIEKVKKVNNEFLEKRRNRTYIKSYVLLDKHEKFKIERENKKDKIVKFFVENIKNNSIKEKIEKILAEFKIDELIKKLEKELKKGNCDTEIFGIFKKHYKVNFDSKKFSKKSDEEKELYKIIYRYLKGRIEKILVNEQKVRLKKMEKIEIEKILNESILSEKILKRVKQYTLEHIMYLGKLRHNDIDMTTVNTDDFSRLHAKEELDLELITFFASTNMELNKIFSRENINNDENIDFFGGDREKNYVLDKKILNSKIKIIRDLDFIDNKNNITNNFIRKFTKIGTNERNRILHAISKERDLQGTQDDYNKVINIIQNLKISDEEVSKALNLDVVFKDKKNIITKINDIKISEENNNDIKYLPSFSKVLPEILNLYRNNPKNEPFDTIETEKIVLNALIYVNKELYKKLILEDDLEENESKNIFLQELKKTLGNIDEIDENIIENYYKNAQISASKGNNKAIKKYQKKVIECYIGYLRKNYEELFDFSDFKMNIQEIKKQIKDINDNKTYERITVKTSDKTIVINDDFEYIISIFALLNSNAVINKIRNRFFATSVWLNTSEYQNIIDILDEIMQLNTLRNECITENWNLNLEEFIQKMKEIEKDFDDFKIQTKKEIFNNYYEDIKNNILTEFKDDINGCDVLEKKLEKIVIFDDETKFEIDKKSNILQDEQRKLSNINKKDLKKKVDQYIKDKDQEIKSKILCRIIFNSDFLKKYKKEIDNLIEDMESENENKFQEIYYPKERKNELYIYKKNLFLNIGNPNFDKIYGLISNDIKMADAKFLFNIDGKNIRKNKISEIDAILKNLNDKLNGYSKEYKEKYIKKLKENDDFFAKNIQNKNYKSFEKDYNRVSEYKKIRDLVEFNYLNKIESYLIDINWKLAIQMARFERDMHYIVNGLRELGIIKLSGYNTGISRAYPKRNGSDGFYTTTAYYKFFDEESYKKFEKICYGFGIDLSENSEINKPENESIRNYISHFYIVRNPFADYSIAEQIDRVSNLLSYSTRYNNSTYASVFEVFKKDVNLDYDELKKKFKLIGNNDILERLMKPKKVSVLELESYNSDYIKNLIIELLTKIENTNDTL

SEQ ID NO: 847 - RNA, 86 nt, Artificial Sequence
  Synthetic Sequence
ggaaccauucaaaacagcauagcaaguuaaaauaaggcuaguccguuaucaacuugaaaaaguggcaccgagucggugcuuuuuuu

SEQ ID NO: 848 - RNA, 67 nt, Artificial Sequence
  Synthetic Sequence
uagcaaguuaaaauaaggcuaguccguuaucaacuugaaaaaguggcaccgagucggugcuuuuuuu

SEQ ID NO: 849 - RNA, 88 nt, Streptococcus pyogenes
guuggaaccauucaaaacagcauagcaaguuaaaauaaggcuaguccguuaucaacuugaaaaaguggcaccgagucggugcuuuuuu

SEQ ID NO: 850 - RNA, 93 nt, Listeria innocua
auauuguuaguauucaaaauaacauagcaaguuaaaauaaggcuuuguccguuaucaacuuuuaauuaaguagcgcuguuucggcgcuuuuuu

SEQ ID NO: 851 - RNA, 104 nt, Streptococcus mutans
uguuggaaucauucgaaacaacacagcaaguuaaaauaaggcagugauuuuuaauccaguccguacacaacuugaaaaagugcgcaccgauucggugcuuuuuu

SEQ ID NO: 852 - RNA, 95 nt, Streptococcus thermophilus
uugugguuugaaaccauucgaaacaacacagcgaguuaaaauaaggcuuaguccguacucaacuugaaaagguggcaccgauucgguguuuuuuu

SEQ ID NO: 853 - RNA, 118 nt, Streptococcus thermophilus
uaauaauaguguaagggacgccuuacacaguuacuuaaaucuugcagaagcuacaaagauaaggcuucaugccgaaaucaacacccugucauuuuauggcaggguguuuucguuauuu

SEQ ID NO: 854 - RNA, 112 nt, Neisseria meningitidis
cauauugucgcacugcgaaaugagaaccguugcuacaauaaggccgucugaaaagaugugccgcaacgcucugccccuuaaagcuucugcuuuaaggggcaucguuuauuuc

SEQ ID NO: 855 - RNA, 110 nt, Pasteurella multocida
gcauauuguugcacugcgaaaugagagacguugcuacaauaaggcuucugaaaagaaugaccguaacgcucugccccuugugauucuuaauugcaaggggcaucguuuuu

SEQ ID NO: 856 - RNA, 115 nt, Mycoplasma mobile
uauuauguauuucgaaauacagauguacaguuaagaauacauaagaaugauacaucacuaaaaaaaggcuuuaugccguaacuacuacuuauuuucaaaauaaguaguuuuuuuu

SEQ ID NO: 857 - RNA, 26 nt, Artificial Sequence
  Synthetic Sequence
uagcaaguuaaaauaaggcuaguccg

SEQ ID NO: 858 - RNA, 36 nt, Streptococcus pyogenes
uuguuggaaccauucaaaacagcauagcaaguuaaa

SEQ ID NO: 859 - RNA, 36 nt, Streptococcus mutans
guguuggaaucauucgaaacaacacagcaaguuaaa

SEQ ID NO: 860 - RNA, 36 nt, Streptococcus thermophilus
gguuugaaaccauucgaaacaacacagcgaguuaaa

SEQ ID NO: 861 - RNA, 36 nt, Streptococcus thermophilus
cuuacacaguuacuuaaaucuugcagaagcuacaaa

SEQ ID NO: 862 - RNA, 36 nt, Listeria innocua
auauuguuaguauucaaaauaacauagcaaguuaaa

SEQ ID NO: 863 - RNA, 34 nt, Listeria innocua
auuguuaguauucaaaauaacauagcaaguuaaa

SEQ ID NO: 864 - RNA, 36 nt, Treponema denticola
auuuaagauccaucuuaaauuacacaacgaguucaa

SEQ ID NO: 865 - RNA, 36 nt, Neisseria meningitidis
auugucgcacugcgaaaugagaaccguugcuacaau

SEQ ID NO: 866 - RNA, 38 nt, Neisseria meningitidis
auauugucgcacugcgaaaugagaaccguugcuacaau

SEQ ID NO: 867 - RNA, 36 nt, Streptococcus gordonii; identical to SEQ ID NO: 861

SEQ ID NO: 868 - RNA, 36 nt, Bifidobacterium bifidum
augaucaaggucauugaccugacaggcauaaauuga

SEQ ID NO: 869 - RNA, 36 nt, Lactobacillus salivarius
gguuuugaccucauugauuuaacauucugaguugaa

SEQ ID NO: 870 - RNA, 37 nt, Francisella tularensis
guuucaguuguuagauuauuugguauguacuuguguu

SEQ ID NO: 871 - RNA, 37 nt, Francisella tularensis
auuacagagcauuaauuauuugguacauuuauaauuu

SEQ ID NO: 872 - RNA, 37 nt, Legionella pneumophila
auuucaggguaucgaaauuuagaugauuucuaauuua

SEQ ID NO: 873 - RNA, 36 nt, Nitratifractor salsuginis
uguaacaggguaggguuuuuugaggggucuuaaaau

SEQ ID NO: 874 - RNA, 36 nt, Butyrivibrio fibrisolvens
aguuucuaaucacuuaauuuuuucggaccuacuaaa

SEQ ID NO: 875 - RNA, 36 nt, Streptobacillus moniliformis
gauucacauuauucaaguuuacuacagauucuguau

SEQ ID NO: 876 - RNA, 36 nt, Mycoplasma mobile
aguuaagaauacauaagaaugauacaucacuaaaaa

SEQ ID NO: 877 - RNA, 44 nt, Capnocytophaga ochracea
auugugaauugcuuucaaauugugcgacaaaaguagguauaaua

SEQ ID NO: 878 - RNA, 36 nt, Acidovorax ebreus
auugcagcaacggcucucaccccggauaaccacaau

SEQ ID NO: 879 - RNA, 36 nt, Wolinella succinogenes
auagccgcugccuacucagccauuuagcgcagcgac

SEQ ID NO: 880 - RNA, 37 nt, Wolinella succinogenes
uuuguuaaagcuggaugggauuauuauagaguguugc

SEQ ID NO: 881 - RNA, 37 nt, Wolinella succinogenes
uuucaaggcaucgaacggauuugcuauaaaguguugc

SEQ ID NO: 882 - RNA, 36 nt, Prevotella ruminicola
uuuugcacacguaagauuccuacaucuuaucacaau

SEQ ID NO: 883 - RNA, 48 nt, Fibrobacter succinogenes
auugugaauugcuuucagauuaugaaaauaauauaguuaaaauuuuug

SEQ ID NO: 884 - RNA, 36 nt, Campylobacter jejuni
auuuuauuucgauuuuaaucaacccuaaauuucaau

SEQ ID NO: 885 - RNA, 36 nt, Campylobacter jejuni
auuuuagucccuuuuuaaauuucuuaugagauuaua

SEQ ID NO: 886 - RNA, 25 nt, Campylobacter jejuni
aagaaauuuaaaaagggacuaaaau

SEQ ID NO: 887 - RNA, 36 nt, Pasteurella multocida
auuguagcaacgucucucauuucgcagugcaacaau

SEQ ID NO: 888 - RNA, 36 nt, Rhodopseudomonas palustris
gccguggcuuuccuaccgauuucccaccgcaugauu

SEQ ID NO: 889 - RNA, 36 nt, Olsenella uli
ucugaauuaccagucagaacgauacugcgagucaaa

SEQ ID NO: 890 - RNA, 36 nt, Rhodospirillum rubrum
guuccauggccccgucccacacgccaugauagagcg

SEQ ID NO: 891 - RNA, 36 nt, Rhodospirillum rubrum
aaacgggagaaccgucccacacggccaugguagagu

SEQ ID NO: 892 - RNA, 36 nt, Dinoroseobacter shibae
uuaacggcucgaccgcgaauucugaacguaaagaca

SEQ ID NO: 893 - RNA, 36 nt, Verminephrobacter eiseniae
uuagcguccagagcgcauaucccagugagauauccg

SEQ ID NO: 894 - RNA, 75 nt, Streptococcus pyogenes
aaacagcauagcaaguuaaaauaaggcuaguccguuaucaacuugaaaaaguggcaccgagucggugcuuuuuuu

SEQ ID NO: 895 - RNA, 77 nt, Listeria innocua
aaauaacauagcaaguuaaaauaaggcuuuguccguuaucaacuuuuaauuaaguagcgcuguuucggcgcuuuuuu

SEQ ID NO: 896 - RNA, 73 nt, Artificial Sequence
  Synthetic Sequence
aacagcauagcaaguuaaaauaaggcuaguccguuaucaacuugaaaaaguggcaccgagucggugcuuuuuu

SEQ ID NO: 897 - RNA, 33 nt, Francisella novicida
uauaaauguaccaaauaauuaaugcucuguaau

SEQ ID NO: 898 - RNA, 74 nt, Campylobacter jejuni
aagaaauuuaaaaagggacuaaaauaaagaguuugcgggacucugcgggguuacaauccccuaaaaccgcuuuu

SEQ ID NO: 899 - RNA, 96 nt, Francisella novicida
aucuaaaauuauaaauguaccaaauaauuaaugcucuguaaucauuuaaaaguauuuugaacggaccucuguuugacacgucugaauaacuaaaaa

SEQ ID NO: 900 - RNA, 109 nt, Streptococcus thermophilus2
uguaagggacgccuuacacaguuacuuaaaucuugcagaagcuacaaagauaaggcuucaugccgaaaucaacacccugucauuuuauggcaggguguuuucguuauuu

SEQ ID NO: 901 - RNA, 110 nt, Mycoplasma mobile
uguauuucgaaauacagauguacaguuaagaauacauaagaaugauacaucacuaaaaaaaggcuuuaugccguaacuacuacuuauuuucaaaauaaguaguuuuuuuu

SEQ ID NO: 902 - RNA, 92 nt, Listeria innocua
auuguuaguauucaaaauaacauagcaaguuaaaauaaggcuuuguccguuaucaacuuuuaauuaaguagcgcuguuucggcgcuuuuuuu

SEQ ID NO: 903 - RNA, 89 nt, Streptococcus pyogenes
guuggaaccauucaaaacagcauagcaaguuaaaauaaggcuaguccguuaucaacuugaaaaaguggcaccgagucggugcuuuuuuu

SEQ ID NO: 904 - RNA, 107 nt, Streptococcus mutans
guuggaaucauucgaaacaacacagcaaguuaaaauaaggcagugauuuuuaauccaguccguacacaacuugaaaaagugcgcaccgauucggugcuuuuuuauuu

SEQ ID NO: 905 - RNA, 96 nt, Streptococcus thermophilus
uugugguuugaaaccauucgaaacaacacagcgaguuaaaauaaggcuuaguccguacucaacuugaaaagguggcaccgauucgguguuuuuuuu

SEQ ID NO: 906 - RNA, 102 nt, Neisseria meningitidis
acauauugucgcacugcgaaaugagaaccguugcuacaauaaggccgucugaaaagaugugccgcaacgcucugccccuuaaagcuucugcuuuaaggggca

SEQ ID NO: 907 - RNA, 110 nt, Pasteurella multocida; identical to SEQ ID NO: 855

SEQ ID NO: 908 - RNA, 37 nt, Francisella novicida
aacacaaguacauaccaaauaaucuaacaacugaaac

SEQ ID NO: 909 - RNA, 37 nt, Francisella novicida
aaauuauaaauguaccaaauaauuaaugcucuguaau

SEQ ID NO: 910 - RNA, 37 nt, Wolinella succinogenes; identical to SEQ ID NO: 881

SEQ ID NO: 911 - RNA, 37 nt, Wolinella succinogenes; identical to SEQ ID NO: 880

SEQ ID NO: 912 - RNA, 37 nt, gamma proteobacterium
auuucaguguauagaauguugggaugcauucugaaua

SEQ ID NO: 913 - RNA, 37 nt, gamma proteobacterium
auaacaagggaguauuugcuggaauaagcucugaaac

SEQ ID NO: 914 - RNA, 37 nt, Sutterella wadsworthensis
guuuccaagcaauagcucguggcguuaugauuucugu

SEQ ID NO: 915 - RNA, 37 nt, Sutterella wadsworthensis
ggugauuuccuauagcucauagcguuaugaucucuaa

SEQ ID NO: 916 - RNA, 37 nt, Legionella pneumophila; identical to SEQ ID NO: 872

SEQ ID NO: 917 - RNA, 36 nt, Listeria innocua; identical to SEQ ID NO: 862

SEQ ID NO: 918 - RNA, 36 nt, Streptococcus thermophilus; identical to SEQ ID NO: 860

SEQ ID NO: 919 - RNA, 36 nt, Streptococcus mutans; identical to SEQ ID NO: 859

SEQ ID NO: 920 - RNA, 36 nt, Streptococcus pyogenes; identical to SEQ ID NO: 858

SEQ ID NO: 921 - RNA, 36 nt, Fusobacterium nucleatum
auuuuuaauuuaaguaauaaaaaauggagcauauac

SEQ ID NO: 922 - RNA, 36 nt, Filifactor alocis
aguugacuaccauaugagauuacacuacacgguuca

SEQ ID NO: 923 - RNA, 36 nt, Treponema denticola; identical to SEQ ID NO: 864

SEQ ID NO: 924 - RNA, 36 nt, Solobacterium moorei
cuuauaccaguaagauaauuuacauaguaaguucaa

SEQ ID NO: 925 - RNA, 36 nt, Veillonella atypica
guuuuggagguuuacagaauuacacuacgaguucaa

SEQ ID NO: 926 - RNA, 36 nt, Finegoldia magna
guuuaauaccuauaugagauuacaucaugaguucaa

SEQ ID NO: 927 - RNA, 36 nt, Olsenella uli; identical to SEQ ID NO: 889

SEQ ID NO: 928 - RNA, 36 nt, Lactobacillus rhamnosus
caacuugaauugauugaucugacaucuacgaguuga

SEQ ID NO: 929 - RNA, 36 nt, Lactobacillus gasseri
ugauuagauuucauugaucuaacagccaucuaaaac

SEQ ID NO: 930 - RNA, 36 nt, Lactobacillus gasseri
acacuaaacuuuauugaucuaacaaccagauuuaaa

SEQ ID NO: 931 - RNA, 36 nt, Oenococcus kitaharae
ggguucuaccucauugaucugacacacagcauugaa

SEQ ID NO: 932 - RNA, 36 nt, Bifidobacterium bifidum; identical to SEQ ID NO: 868

SEQ ID NO: 933 - RNA, 36 nt, Staphylococcus pseudintermedius
guuuuacuucuuucuaaauaaacauaguuaaguuaa

SEQ ID NO: 934 - RNA, 36 nt, Eubacterium rectale
auuuuauagucacguaaauuuuucagaucuacuaaa

SEQ ID NO: 935 - RNA, 38 nt, Enterococcus faecalis
auuuuacugauaagaaauuauugagaaucuacaaaaau

SEQ ID NO: 936 - RNA, 36 nt, Streptococcus thermophilus; identical to SEQ ID NO: 861

SEQ ID NO: 937 - RNA, 36 nt, Staphylococcus lugdunensis
cuuguacuuauaccuaaaauuacagaaucuacugaa

SEQ ID NO: 938 - RNA, 36 nt, Eubacterium dolichum
aucauaaucuagcaaaaguuuauaugaucuaacaaa

SEQ ID NO: 939 - RNA, 36 nt, Mycoplasma mobile; identical to SEQ ID NO: 876

SEQ ID NO: 940 - RNA, 36 nt, Mycoplasma ovipneumoniae
auuuuacucuaguaagaaauugucgcacaaaaauaa

SEQ ID NO: 941 - RNA, 36 nt, Mycoplasma gallisepticum
auuauugcuuacacaauuauugucgugcuaaaauaa

SEQ ID NO: 942 - RNA, 36 nt, Mycoplasma canis
auuauuguuuacccaaauauuguacauccuaaauca

SEQ ID NO: 943 - RNA, 36 nt, Mycoplasma synoviae
uacuuacuuaacaaaauaauuguacgauuccaaaau

SEQ ID NO: 944 - RNA, 36 nt, Aminomonas paucivorans
gccuucccucccugccgaaggagcagauccucuccu

SEQ ID NO: 945 - RNA, 36 nt, Clostridium perfringens
uuauaguaacuaguuaaacucucgauaugcuauacc

SEQ ID NO: 946 - RNA, 36 nt, Clostridium cellulolyticum
auuauagcaacaauucaggcuccgauaugccauaau

SEQ ID NO: 947 - RNA, 36 nt, Acidovorax ebreus; identical to SEQ ID NO: 878

SEQ ID NO: 948 - RNA, 36 nt, Neisseria meningitidis; identical to SEQ ID NO: 865

SEQ ID NO: 949 - RNA, 36 nt, Pasteurella multocida
auuguugcacugcgaaaugagagacguugcuacaau

SEQ ID NO: 950 - RNA, 36 nt, phylotype Rs-D17
uuuguaacuuaucugagagaggaugguuauuauaau

SEQ ID NO: 951 - RNA, 36 nt, Wolinella succinogenes; identical to SEQ ID NO: 879

SEQ ID NO: 952 - RNA, 36 nt, Campylobacter jejuni
auaauacaaaaaucauuuuuuuaaacaaacauaaac

SEQ ID NO: 953 - RNA, 36 nt, Campylobacter jejuni
uauaaucucauaagaaauuuaaaaagggacuaaaau

SEQ ID NO: 954 - RNA, 36 nt, Helicobacter mustelae
guauuugucaauaaauauacuuuauaauggcaagau

SEQ ID NO: 955 - RNA, 36 nt, Roseburia intestinalis
uuguaauaaccuaauuaucacuugguaugauauaau

SEQ ID NO: 956 - RNA, 36 nt, Lactobacillus coryniformis
uuuuauucuauaguaaguuuucagcuaaaauagauc

SEQ ID NO: 957 - RNA, 36 nt, Rhodopseudomonas palustris; identical to SEQ ID NO: 888

SEQ ID NO: 958 - RNA, 36 nt, Cand. Puniceispirillum marinum
uaaccauaggcuccucaaucaccagaguguuauugc

SEQ ID NO: 959 - RNA, 36 nt, Verminephrobacter eiseniae; identical to SEQ ID NO: 893

SEQ ID NO: 960 - RNA, 36 nt, Ralstonia syzygii
guuaguagcaaagcgcaauucccgaucugcuggaaa

SEQ ID NO: 961 - RNA, 36 nt, Azospirillum B510
uuaacggcuggacccccgauccccaucgaauuucca

SEQ ID NO: 962 - RNA, 36 nt, Dinoroseobacter shibae; identical to SEQ ID NO: 892

SEQ ID NO: 963 - RNA, 36 nt, Rhodospirillum rubrum; identical to SEQ ID NO: 890

SEQ ID NO: 964 - RNA, 36 nt, Rhodospirillum rubrum; identical to SEQ ID NO: 891

SEQ ID NO: 965 - RNA, 36 nt, Spirochaeta Buddy
auuagagauaaucgcugguuuuuguuaagauauaac

SEQ ID NO: 966 - RNA, 36 nt, Prevotella ruminicola; identical to SEQ ID NO: 882

SEQ ID NO: 967 - RNA, 36 nt, Flavobacterium columnare
agauaaaauuauucuaaucuuuaaucuuaucacaau

SEQ ID NO: 968 - RNA, 36 nt, Parvibaculum lavamentivorans
cuugcgaaaagcgaccgccucucgauuugcuacaga

SEQ ID NO: 969 - RNA, 44 nt, Capnocytophaga ochracea; identical to SEQ ID NO: 877

SEQ ID NO: 970 - RNA, 48 nt, Fibrobacter succinogenes; identical to SEQ ID NO: 883

SEQ ID NO: 971 - RNA, 36 nt, Nitratifractor salsuginis; identical to SEQ ID NO: 873

SEQ ID NO: 972 - RNA, 36 nt, Akkermansia muciniphila
cuuauacgggaacuccacgauaaggcauuuuacaug

SEQ ID NO: 973 - RNA, 88 nt, Artificial Sequence
  Synthetic Sequence
uuggaaccauucaaaacagcauagcaaguuaaaauaaggcuaguccguuaucaacuugaaaaaguggcaccgagucggugcuuuuuuu

SEQ ID NO: 974 - RNA, 77 nt, Artificial Sequence
  Synthetic Sequence
caaaacagcauagcaaguuaaaauaaggcuaguccguuaucaacuugaaaaaguggcaccgagucggugcuuuuuuu

SEQ ID NO: 975 - RNA, 61 nt, Artificial Sequence
  Synthetic Sequence
caaaacagcauagcaaguuaaaauaaggcuaguccguuaucaacuugaaaaaguuuuuuuu

SEQ ID NO: 976 - RNA, 44 nt, Artificial Sequence
  Synthetic Sequence
caaaacagcauagcaaguuaaaauaaggcuaguccguuuuuuuu

SEQ ID NO: 977 - RNA, 72 nt, Artificial Sequence
  Synthetic Sequence
caaaacagcauagcaaguuaaaauaaggcuaguccgguucacugccguauaggcagcuaagaaauuuuuuuu

SEQ ID NO: 978 - RNA, 14 nt, Artificial Sequence
  Synthetic Sequence
uagcaaguuaaaau

SEQ ID NO: 979 - RNA, 102 nt, Artificial Sequence
  Synthetic Sequence
  misc_feature (1)..(80): n is a, c, g, or u
nnnnnnnnnnnnnnnnnnnnnnnnnnnnnnnnnnnnnnnnnnnnnnnnnnnnnnnnnnnnnnnnnnnnnnnnnnnnnnnnguuuuagagcuaugcuguuuug

SEQ ID NO: 980 - RNA, 102 nt, Artificial Sequence
  Synthetic Sequence
  misc_feature (1)..(80): n is a, c, g, or u
nnnnnnnnnnnnnnnnnnnnnnnnnnnnnnnnnnnnnnnnnnnnnnnnnnnnnnnnnnnnnnnnnnnnnnnnnnnnnnnnguuuuagagcuauguuauuuug

SEQ ID NO: 981 - RNA, 92 nt, exemplary
  misc_feature (1)..(80): n is a, c, g, or u
nnnnnnnnnnnnnnnnnnnnnnnnnnnnnnnnnnnnnnnnnnnnnnnnnnnnnnnnnnnnnnnnnnnnnnnnnnnnnnnnguuuuagagcua

SEQ ID NO: 982 - RNA, 152 nt, Artificial Sequence
  Synthetic Sequence
  misc_feature (37)..(116): n is a, c, g, or u
guuuuagagcuaugcuguuuugaauggucccaaaacnnnnnnnnnnnnnnnnnnnnnnnnnnnnnnnnnnnnnnnnnnnnnnnnnnnnnnnnnnnnnnnnnnnnnnnnnnnnnnnnguuuuagagcuaugcuguuuugaauggucccaaaac

SEQ ID NO: 983 - RNA, 188 nt, Artificial Sequence
  Synthetic Sequence
  misc_feature (37)..(116): n is a, c, g, or u
guuuuagagcuaugcuguuuugaauggucccaaaacnnnnnnnnnnnnnnnnnnnnnnnnnnnnnnnnnnnnnnnnnnnnnnnnnnnnnnnnnnnnnnnnnnnnnnnnnnnnnnnnguuuuagagcuaugcuguuuugaauggucccaaaacguuuuagagcuaugcuguuuugaauggucccaaaac

SEQ ID NO: 984 - RNA, 22 nt, exemplary
guuuuagagcuaugcuguuuug

SEQ ID NO: 985 - RNA, 36 nt, Streptococcus pyogenes
guuuuagagcuaugcuguuuugaauggucccaaaac

SEQ ID NO: 986 - RNA, 36 nt, Pasteurella multocida
guuguaguucccucucucauuucgcagugcuacaau

SEQ ID NO: 987 - RNA, 36 nt, Mycoplasma mobile
guuuugguguaguaucauucuuauguauucuuaaac

SEQ ID NO: 988 - RNA, 37 nt, Francisella novicida
guuucaguugcugaauuauuugguaaacuacuguuag

SEQ ID NO: 989 - RNA, 33 nt, Francisella novicida
guuucaguugcugaauuauuugguaaacuacug

SEQ ID NO: 990 - RNA, 36 nt, Streptococcus mutans
guuuuagagcuguguuguuucgaaugguuccaaaac

SEQ ID NO: 991 - RNA, 36 nt, Streptococcus thermophilus; identical to SEQ ID NO: 990

SEQ ID NO: 992 - RNA, 36 nt, Streptococcus thermophilus
guuuuuguacucucaagauuuaaguaacuguacaac

SEQ ID NO: 993 - RNA, 36 nt, Listeria innocua
guuuuagagcuauguuauuuugaaugcuaacaaaac

SEQ ID NO: 994 - RNA, 36 nt, Treponema denticola
guuugagaguuguguaauuuaagauggaucucaaac

SEQ ID NO: 995 - RNA, 36 nt, Neisseria meningitidis
guuguagcucccuuucucauuucgcagugcuacaau

SEQ ID NO: 996 - RNA, 36 nt, Streptococcus gordonii; identical to SEQ ID NO: 992

SEQ ID NO: 997 - RNA, 35 nt, Bifidobacterium bifidum
guuucaaugccugucagaucaaugacuuugaccac

SEQ ID NO: 998 - RNA, 36 nt, Lactobacillus salivarius
guuucagaaguauguuaaaucaauaagguuaagacc

SEQ ID NO: 999 - RNA, 37 nt, Francisella novicida
cuaacaguaguuuaccaaauaauucagcaacugaaac

SEQ ID NO: 1000 - RNA, 37 nt, Francisella novicida; identical to SEQ ID NO: 999

SEQ ID NO: 1001 - RNA, 37 nt, Legionella pneumophila
ccaauaaucccucaucuaaaaauccaaccacugaaac

SEQ ID NO: 1002 - RNA, 36 nt, Nitratifractor salsuginis
guuuuaagaccccucaaaaccccacccuguuacaau

SEQ ID NO: 1003 - RNA, 36 nt, Butyrivibrio fibrisolvens
guuuuaguacccgggaaaauuaagugauuggaaaac

SEQ ID NO: 1004 - RNA, 36 nt, Streptobacillus moniliformis
gauacagauucuugguaaauuugaauaaugugaaug

SEQ ID NO: 1005 - RNA, 36 nt, Mycoplasma mobile; identical to SEQ ID NO: 987

SEQ ID NO: 1006 - RNA, 44 nt, Capnocytophaga ochracea
uguuaucaaucgcaaaacuacaaaauuugaaagcaauucacaac

SEQ ID NO: 1007 - RNA, 36 nt, Acidovorax ebreus
aguguagcuauccggggugagagagggagcuacaac

SEQ ID NO: 1008 - RNA, 36 nt, Wolinella succinogenes
auuauagcgaggaauggcugaguaggcggcuauaac

SEQ ID NO: 1009 - RNA, 37 nt, Wolinella succinogenes
gcaacacuuuauagcaaauccgcuuagccugugaaac

SEQ ID NO: 1010 - RNA, 37 nt, Wolinella succinogenes; identical to SEQ ID NO: 1009

SEQ ID NO: 1011 - RNA, 36 nt, Prevotella ruminicola
guugugguuugauguaggaaaggaaugauauacaac

SEQ ID NO: 1012 - RNA, 48 nt, Fibrobacter succinogenes
guuguuauugcacuaguaaaacuagaaaaucugaaagcaauucacaac

SEQ ID NO: 1013 - RNA, 36 nt, Campylobacter jejuni
auuuuaccauaaagaaauuuaaaaagggacuaaaac

SEQ ID NO: 1014 - RNA, 36 nt, Campylobacter jejuni
guuuuagucccuuuuuaaauuucuuuaugguaaaau

SEQ ID NO: 1015 - RNA, 36 nt, Pasteurella multocida
auuguagcacugcgaaaugagagagggaacuacaac

SEQ ID NO: 1016 - RNA, 36 nt, Rhodopseudomonas palustris
agccuaccacggggaaaucgguagggaagccacggc

SEQ ID NO: 1017 - RNA, 36 nt, Olsenella uli
guuuuggggcagugucguuuugacugguaaucaaac

SEQ ID NO: 1018 - RNA, 36 nt, Rhodospirillum rubrum
acucuaccauggcggugugggacggggccauggaac

SEQ ID NO: 1019 - RNA, 36 nt, Rhodospirillum rubrum; identical to SEQ ID NO: 1018

SEQ ID NO: 1020 - RNA, 36 nt, Dinoroseobacter shibae
aguuuagcuguucagaauucgggguccagccgcaac

SEQ ID NO: 1021 - RNA, 36 nt, Verminephrobacter eiseniae
auuguagcucacugggauaugcgcacuggccggaac

SEQ ID NO: 1022 - RNA, 37 nt, Francisella novicida; identical to SEQ ID NO: 988

SEQ ID NO: 1023 - RNA, 37 nt, Francisella novicida; identical to SEQ ID NO: 988

SEQ ID NO: 1024 - RNA, 37 nt, Wolinella succinogenes; identical to SEQ ID NO: 1009

SEQ ID NO: 1025 - RNA, 37 nt, Wolinella succinogenes; identical to SEQ ID NO: 1009

SEQ ID NO: 1026 - RNA, 37 nt, gamma proteobacterium
guuucagagcuuaucccaacaaaccaacagcugaaac

SEQ ID NO: 1027 - RNA, 37 nt, gamma proteobacterium; identical to SEQ ID NO: 1026

SEQ ID NO: 1028 - RNA, 37 nt, Sutterella wadsworthensis
gcgaagaucauaacgcuacgagcuauagcacugaaac

SEQ ID NO: 1029 - RNA, 37 nt, Sutterella wadsworthensis; identical to SEQ ID NO: 1028

SEQ ID NO: 1030 - RNA, 37 nt, Legionella pneumophila; identical to SEQ ID NO: 1001

SEQ ID NO: 1031 - RNA, 36 nt, Listeria innocua; identical to SEQ ID NO: 993

SEQ ID NO: 1032 - RNA, 36 nt, Streptococcus thermophilus; identical to SEQ ID NO: 990

SEQ ID NO: 1033 - RNA, 36 nt, Streptococcus mutans; identical to SEQ ID NO: 990

SEQ ID NO: 1034 - RNA, 36 nt, Streptococcus pyogenes; identical to SEQ ID NO: 985

SEQ ID NO: 1035 - RNA, 36 nt, Fusobacterium nucleatum
guuugagaguaauguuauuuuaaauagauucaaaac

SEQ ID NO: 1036 - RNA, 36 nt, Filifactor alocis
guuugagaguaguguaauuucauaugguagucaaac

SEQ ID NO: 1037 - RNA, 36 nt, Treponema denticola; identical to SEQ ID NO: 994

SEQ ID NO: 1038 - RNA, 36 nt, Solobacterium moorei
guuugagaacuauguaaauuaugcugguagcaaaac

SEQ ID NO: 1039 - RNA, 36 nt, Veillonella atypica
guuugcgaguaguguaauucuguaaaucucuaaaac

SEQ ID NO: 1040 - RNA, 36 nt, Finegoldia magna
guuugagaaugauguaauuucauauagguauuaaac

SEQ ID NO: 1041 - RNA, 36 nt, Olsenella uli; identical to SEQ ID NO: 1017

SEQ ID NO: 1042 - RNA, 36 nt, Lactobacillus rhamnosus
gucucagguagaugucagaucaaucaguucaagagc

SEQ ID NO: 1043 - RNA, 36 nt, Lactobacillus gasseri
guuuuagaugguuguuagaucaauaagguuuagauc

SEQ ID NO: 1044 - RNA, 36 nt, Lactobacillus gasseri; identical to SEQ ID NO: 1043

SEQ ID NO: 1045 - RNA, 36 nt, Oenococcus kitaharae
gcuucagaugugugucagaucaaugagguagaaccc

SEQ ID NO: 1046 - RNA, 36 nt, Bifidobacterium bifidum
guuucagaugccugucagaucaaugacuuugaccac

SEQ ID NO: 1047 - RNA, 36 nt, Staphylococcus pseudintermedius
guuuuagcacuauguuuauuuagaaagagguaaaac

SEQ ID NO: 1048 - RNA, 36 nt, Eubacterium rectale
auuuuaguaacugaauaauuuacgugacuguaaaac

SEQ ID NO: 1049 - RNA, 36 nt, Enterococcus faecalis
guuuuuguauucucaauaauuucuuaucaguaaaac

SEQ ID NO: 1050 - RNA, 36 nt, Streptococcus thermophilus; identical to SEQ ID NO: 992

SEQ ID NO: 1051 - RNA, 36 nt, Staphylococcus lugdunensis
guuuuaguacucuguaauuuuagguauaagugauac

SEQ ID NO: 1052 - RNA, 36 nt, Eubacterium dolichum
guuuuguuaccauauggauuuuugcuagauuaagac

SEQ ID NO: 1053 - RNA, 36 nt, Mycoplasma mobile; identical to SEQ ID NO: 987

SEQ ID NO: 1054 - RNA, 36 nt, Mycoplasma ovipneumoniae
guuuuugugcuguacaauuucuuacuagaguaaaac

SEQ ID NO: 1055 - RNA, 36 nt, Mycoplasma gallisepticum
guuuuagcacuguacaauacuuguguaagcaauaac

SEQ ID NO: 1056 - RNA, 36 nt, Mycoplasma canis
guuuuaguguuguacaauauuuggguaaacaauaac

SEQ ID NO: 1057 - RNA, 36 nt, Mycoplasma synoviae
guuuugggguuguacaauuauuuuguuaaguaaaac

SEQ ID NO: 1058 - RNA, 36 nt, Aminomonas paucivorans
agcauagcauuucggagugcggcagggagcuaugac

SEQ ID NO: 1059 - RNA, 36 nt, Clostridium perfringens
auuauagcauaucgagaauuuacuaggaacuauaac

SEQ ID NO: 1060 - RNA, 36 nt, Clostridium cellulolyticum
auuauagcauaucggagccugaauuggagcuauaac

SEQ ID NO: 1061 - RNA, 36 nt, Acidovorax ebreus; identical to SEQ ID NO: 1007

SEQ ID NO: 1062 - RNA, 36 nt, Neisseria meningitidis; identical to SEQ ID NO: 995

SEQ ID NO: 1063 - RNA, 36 nt, Pasteurella multocida; identical to SEQ ID NO: 986

SEQ ID NO: 1064 - RNA, 36 nt, phylotype Rs-D17
guuauaguuuccuuccucucucagaugugcuauaau

SEQ ID NO: 1065 - RNA, 36 nt, Wolinella succinogenes; identical to SEQ ID NO: 1008

SEQ ID NO: 1066 - RNA, 36 nt, Campylobacter jejuni; identical to SEQ ID NO: 1014

SEQ ID NO: 1067 - RNA, 36 nt, Campylobacter jejuni; identical to SEQ ID NO: 1014

SEQ ID NO: 1068 - RNA, 36 nt, Helicobacter mustelae
auuuuagcauaaacauauuuaugaaguggcuaaaac

SEQ ID NO: 1069 - RNA, 36 nt, Roseburia intestinalis
auuauaccauaccaagugauaacagggaauuacaac

SEQ ID NO: 1070 - RNA, 36 nt, Lactobacillus coryniformis
gaucuauuuuagcugaaaacugaaggaaucaauagc

SEQ ID NO: 1071 - RNA, 36 nt, Rhodopseudomonas palustris; identical to SEQ ID NO: 1016

SEQ ID NO: 1072 - RNA, 36 nt, Cand. Puniceispirillum marinum
aguauagcacucuggugauugagagccuagagcaac

SEQ ID NO: 1073 - RNA, 36 nt, Verminephrobacter eiseniae; identical to SEQ ID NO: 1021

SEQ ID NO: 1074 - RNA, 36 nt, Ralstonia syzygii
agguuagcagaucgggaauugcgcucuggcuacaac

SEQ ID NO: 1075 - RNA, 36 nt, Azospirillum B510
aguguagccgauggggaucggggguccagccgcaac

SEQ ID NO: 1076 - RNA, 36 nt, Dinoroseobacter shibae; identical to SEQ ID NO: 1020

SEQ ID NO: 1077 - RNA, 36 nt, Rhodospirillum rubrum; identical to SEQ ID NO: 1018

SEQ ID NO: 1078 - RNA, 36 nt, Rhodospirillum rubrum; identical to SEQ ID NO: 1018

SEQ ID NO: 1079 - RNA, 36 nt, Spirochaeta Buddy
ggucaaucuuaacaaaaaucagcggucauccccaac

SEQ ID NO: 1080 - RNA, 36 nt, Prevotella ruminicola; identical to SEQ ID NO: 1011

SEQ ID NO: 1081 - RNA, 36 nt, Flavobacterium columnare
guugugguuugauuaaagauuagaaaacacgauauu

SEQ ID NO: 1082 - RNA, 36 nt, Parvibaculum lavamentivorans
agaguagcaaaucgagagacggccgcaauccgcagc

SEQ ID NO: 1083 - RNA, 44 nt, Capnocytophaga ochracea; identical to SEQ ID NO: 1006

SEQ ID NO: 1084 - RNA, 48 nt, Fibrobacter succinogenes; identical to SEQ ID NO: 1012

SEQ ID NO: 1085 - RNA, 36 nt, Nitratifractor salsuginis; identical to SEQ ID NO: 1002

SEQ ID NO: 1086 - RNA, 36 nt, Akkermansia muciniphila
guuguacugugccuuauuuuggauucaaggcaaaac

SEQ ID NO: 1087 - RNA, 44 nt, Artificial Sequence
  Synthetic Sequence
guuuuagagcuagaaauagcaaguuaaaauaaggcuaguccguu

SEQ ID NO: 1088 - RNA, 60 nt, Artificial Sequence
  Synthetic Sequence
  misc_feature (13)..(17): n is a, c, g, or u
guuuuagagcuannnnnuagcaaguuaaaauaaguuaaaauaaggcuaguccguuaucaa

SEQ ID NO: 1089 - RNA, 68 nt, Artificial Sequence
  Synthetic Sequence
guuuuagagcuaugcugaaaagcauagcaaguuaaaaauaaguuaaaauaaggcuaguccguuaucaa

SEQ ID NO: 1090 - RNA, 69 nt, Artificial Sequence
  Synthetic Sequence
guuuuagagcuaugcuguuuuggaaacaaaacagcauagcaaguuaaaauaaggcuaguccguuaucaa

SEQ ID NO: 1091 - RNA, 70 nt, Artificial Sequence
  Synthetic Sequence
guuuuagagcuaguuuuagagcuagaaauagcaaguuaaaauuagcaaguuaaaauaaggcuaguccguu

SEQ ID NO: 1092 - RNA, 70 nt, Artificial Sequence
  Synthetic Sequence
guuuuagagcuauagcaaguuaaaaugaaaguuuuagagcuauagcaaguuaaaauaaggcuaguccguu

SEQ ID NO: 1093 - RNA, 74 nt, Artificial Sequence
  Synthetic Sequence
guuuuagagcuagaaauagcaaguuaaaauguuuuagagcuagaaauagcaaguuaaaauaaggcuaguccguu

SEQ ID NO: 1094 - RNA, 119 nt, Artificial Sequence
  Synthetic Sequence
guuuuagagcuaugcuguuuuggaaacaaaacagcauagcaaguuaaaauguuuuagagcuaugcuguuuuggaaacaaaacagcauagcaaguuaaaauaaggcuaguccguuaucaa

SEQ ID NO: 1095 - RNA, 12 nt, Artificial Sequence
  Synthetic Sequence
guuuuagagcua

SEQ ID NO: 1096 - RNA, 19 nt, Artificial Sequence
  Synthetic Sequence
aauuucuacuguuguagau

SEQ ID NO: 1097 - RNA, 19 nt, Artificial Sequence
  Synthetic Sequence
aauuucugcuguugcagau

SEQ ID NO: 1098 - RNA, 19 nt, Artificial Sequence
  Synthetic Sequence
aauuuccacuguuguggau

SEQ ID NO: 1099 - RNA, 19 nt, Artificial Sequence
  Synthetic Sequence
aauuccuacuguuguaggu

SEQ ID NO: 1100 - RNA, 19 nt, Artificial Sequence
  Synthetic Sequence
aauuucuacuauuguagau

SEQ ID NO: 1101 - RNA, 19 nt, Artificial Sequence
  Synthetic Sequence
aauuucuacugcuguagau

SEQ ID NO: 1102 - RNA, 18 nt, Artificial Sequence
  Synthetic Sequence
aauuucuacuuuguagau

SEQ ID NO: 1103 - RNA, 17 nt, Artificial Sequence
  Synthetic Sequence
aauuucuacuuguagau

SEQ ID NO: 1104 - RNA, 67 nt, Artificial Sequence
  Synthetic Sequence
gaauuuuucaacgggugugccaauggccacuuuccagguggcaaagcccguugagcuucucaaaaag

SEQ ID NO: 1105 - RNA, 79 nt, Artificial Sequence
  Synthetic Sequence
gucuagaggacagaauuuuucaacgggugugccaauggccacuuuccagguggcaaagcccguugagcuucucaaaaag

SEQ ID NO: 1106 - RNA, 78 nt, Artificial Sequence
  Synthetic Sequence
ucuagaggacagaauuuuucaacgggugugccaauggccacuuuccagguggcaaagcccguugagcuucucaaaaag

SEQ ID NO: 1107 - RNA, 36 nt, Artificial Sequence
  Synthetic Sequence
acuuuccaggcaaagcccguugagcuucucaaaaag

SEQ ID NO: 1108 - RNA, 9 nt, Artificial Sequence
  Synthetic Sequence
agcuucuca

SEQ ID NO: 1109 - RNA, 8 nt, Artificial Sequence
  Synthetic Sequence
gcuucuca

SEQ ID NO: 1110 - RNA, 34 nt, Artificial Sequence
  Synthetic Sequence
  misc_feature (15)..(34): n is a, c, g, or u
cugagaaguggcacnnnnnnnnnnnnnnnnnnnn

SEQ ID NO: 1111 - RNA, 14 nt, Artificial Sequence
  Synthetic Sequence
cugagaaguggcac

SEQ ID NO: 1112 - RNA, 9 nt, Artificial Sequence
  Synthetic Sequence
cugagaagu

SEQ ID NO: 1113 - RNA, 13 nt, Artificial Sequence
  Synthetic Sequence
ugagaaguggcac

SEQ ID NO: 1114 - RNA, 8 nt, Artificial Sequence
  Synthetic Sequence
ugagaagu

SEQ ID NO: 1115 - protein, 152 aa, Artificial Sequence
  synthetic polypeptide
QRGNRQAATADVNTQGVLPGMVWQDRDVYLQGPIWAKIPHTDGHFHPSPLMGGFGLKHPPPQILIKNTPVPANPSTTFSAAKFASFITQYSTGQVSVEIEWELQKENSKRWNPEVQYTSNYNKSVNVDFTVDTNGVYSEPRPIGTRYLTRNL

SEQ ID NO: 1116 - DNA, 36 bp, Artificial Sequence
  synthetic polynucleotide
  misc_feature (14)..(18): n is a, c, g, or t
gctcttccgatctnnnnntcgacccagctgtcggag

SEQ ID NO: 1117 - DNA, 36 bp, Artificial Sequence
  synthetic polynucleotide
  misc_feature (14)..(18): n is a, c, g, or t
gctcttccgatctnnnnntcactgtgtggcttcagg

SEQ ID NO: 1118 - DNA, 41 bp, Artificial Sequence
  synthetic polynucleotide
  misc_feature (14)..(18): n is a, c, g, or t
gctcttccgatctnnnnngctggccttcagttctaaggtag

SEQ ID NO: 1119 - DNA, 40 bp, Artificial Sequence
  synthetic polynucleotide
  misc_feature (14)..(18): n is a, c, g, or t
gctcttccgatctnnnnncgttaatcatattgcgacgggc

SEQ ID NO: 1120 - DNA, 90 bp, Artificial Sequence
  synthetic polynucleotide
gtaaccaaaaccaacgcgaccgttaccatcgccaactacagtcagagctgtgaaggagaaaatacgaccacctacggttttagatacgcg

SEQ ID NO: 1121 - DNA, 90 bp, Artificial Sequence
  synthetic polynucleotide
accgtaaccaaaaccaacgcgaccgttaccatcgccaactacagtcagagctgtgaaggagaaaatacgaccatctttaacggttttaga

SEQ ID NO: 1122 - DNA, 90 bp, Artificial Sequence
  synthetic polynucleotide
aaccaacgcgaccgttaccatcgccaactacagtcagagctgtgaaggagaaaatacgaccacctttaacgttagatacgcggtttaccg

SEQ ID NO: 1123 - DNA, 90 bp, Artificial Sequence
  synthetic polynucleotide
aaccaacgcgaccgttaccatcgccaactacagtcagagctgtgaaggagaaaatacgaccacctttaactttagatacgcggtttaccg

SEQ ID NO: 1124 - DNA, 90 bp, Artificial Sequence
  synthetic polynucleotide
gtgaaggagaaaatacgaccacctttaacggttttagatacgcggatcagcttttcctgcagttcgccagcttgtttttcgatgtgagcc

SEQ ID NO: 1125 - DNA, 20 bp, Artificial Sequence
  synthetic polynucleotide
ttgctggccgtacattaata

SEQ ID NO: 1126 - DNA, 20 bp, Artificial Sequence
  synthetic polynucleotide
acattaatacggctccgcag

SEQ ID NO: 1127 - DNA, 20 bp, Artificial Sequence
  synthetic polynucleotide
tgatattgatttgctggtta

SEQ ID NO: 1128 - DNA, 20 bp, Artificial Sequence
  synthetic polynucleotide
tgccttggtaggtccagcgg

SEQ ID NO: 1129 - DNA, 20 bp, Artificial Sequence
  synthetic polynucleotide
gcatggaaacagttacaggg

SEQ ID NO: 1130 - DNA, 20 bp, Artificial Sequence
  synthetic polynucleotide
gtatctaaaaccgttaaagg

SEQ ID NO: 1131 - DNA, 20 bp, Artificial Sequence
  synthetic polynucleotide
gttcgttaccacaccgtacg

SEQ ID NO: 1132 - DNA, 20 bp, Artificial Sequence
  synthetic polynucleotide
gctctgactgtagttggcga

SEQ ID NO: 1133 - DNA, 20 bp, Artificial Sequence
  synthetic polynucleotide
agcagcgatccagaaagcga

SEQ ID NO: 1134 - DNA, 20 bp, Artificial Sequence
  synthetic polynucleotide
ggtaccggtatcatcgccgg

SEQ ID NO: 1135 - DNA, 20 bp, Artificial Sequence
  Synthetic Sequence
ttccaccaacccgatcaacg

SEQ ID NO: 1136 - DNA, 20 bp, Artificial Sequence
  Synthetic Sequence
aatccgttgaagaaattctg

SEQ ID NO: 1137 - DNA, 2836 bp, Artificial Sequence
  Synthetic Sequence
aacggatttacggctagctcagtcctaggtacaatgctagcgctagcaaagaggagaaaagatctatgcgctcacgcaactggtcccgcaccttgaccgaacgcagcggtggtaacggcgcagtggcggttttcatggcttgttatgactgtttttttggggtacagtctatgcctcgcgcatccaagcagcaagcgcgttacgccgtgggtcgatgtttgatgttatggagcagcaacgatgttacgcagcagggcagtcgccctaaaacaaagttaaacattatgcgcgaagcggtgatcgccgaagtatcgacccagctgtcggaggtggtgggggtcattgaacgtcacctggaaccgaccttgctggccgtacattaatacggctccgcagtggatggcggcctgaagccacacagtgatattgatttgctggttacggtgaccgtacgccttgatgaaacaacgcgccgcgctttgatcaacgaccttttggaaacttcggcttcccctggagagagcgagattctccgcgctgtagaagtcaccattgttgtgcacgacgacatcattccgtggcgttatccagctaagcgcgaactgcaatttggagaatggcagcgcaatgacattcttgcgggtatcttcgagccagccacgatcgacattgatctggctatcttgctgacaaaagcacgcgaacatagcgttgccttggtaggtccagcggcggaggaactctttgatccggttcctgaacaggatctgtttgaggcgctgaatgaaaccttaacgctgtggaactcgccgcccgactgggctggcgatgagcgcaatgtagtgcttacgttgtcccgcatttggtacagcgcagtaaccggcaaaatcgcgccgaaggatgtcgctgccgactgggcaatggagcgcctgccggcccagtatcagcccgtcattcttgaagctcgccaggcttatcttggacaagaagaagatcgcttggcctcgcgcgcagatcagttggaagaatttgtccactacgtgaaaggcgagatcaccaaggtagtcggcaaataaggatcctaactcgagctcggtaccaaattccagaaaagaggcctcccgaaaggggggccttttttcgttttggtccgctgccaatgagacgacggggtcatcacggctcatcatgcgccaaacaaatgtgtgcaatacacgctcggatgactgcatgatgaccgcactgactggggacagcagatccacctaagcctgtgagagaagcagacacccgacagatcaaggcagttaactagtgcactgcagtacagcggccgctagcggagtgtatactggcttactatgttggcactgatgagggtgtcagtgaagtgcttcatgtggcaggagaaaaaaggctgcaccggtgcgtcagcagaatatgtgatacaggatatattccgcttcctcgctcactgactcgctacgctcggtcgttcgactgcggcgagcggaaatggcttacgaacggggcggagatttcctggaagatgccaggaagatacttaacagggaagtgagagggccgcggcaaagccgtttttccataggctccgcccccctgacaagcatcacgaaatctgacgctcaaatcagtggtggcgaaacccgacaggactataaagataccaggcgtttccccctggcggctccctcgtgcgctctcctgttcctgcctttcggtttaccggtgtcattccgctgttatggccgcgtttgtctcattccacgcctgacactcagttccgggtaggcagttcgctccaagctggactgtatgcacgaaccccccgttcagtccgaccgctgcgccttatccggtaactatcgtcttgagtccaacccggaaagacatgcaaaagcaccactggcagcagccactggtaattgatttagaggagttagtcttgaagtcatgcgccggttaaggctaaactgaaaggacaagttttggtgactgcgctcctccaagccagttacctcggttcaaagagttggtagctcagagaaccttcgaaaaaccgccctgcaaggcggttttttcgttttcagagcaagagattacgcgcagaccaaaacgatctcaagaagatcatcttattaatcagataaaatatttttgacagctagctcagtcctaggtataatgctagcgttaataaggagaaggaaaagtatgggtcaaagtagcgatgaagccaacgctcccgttgcagggcagtttgcgcttcccctgagtgccacctttggcttaggggatcgcgtacgcaagaaatctggtgccgcttggcagggtcaagtcgtcggttggtattgcacaaaactcactcctgaaggctatgcggtagagtccgaatcccacccaggctcagtgcaaatttatcctgtggctgcacttgaacgtgtggcctaaactgctcccggtcacactagaaaataaaaacagccgtgcctctttctggcaacggctgtttttatttattcaaccttaattaaggacagctattgtagataagtggggatactacgggtataaaaaaacccgccggggcgggtttttttacgttgcttcagagcggccgcccctgaattcgcatctagatggtagagccacaaacagccggtacaagcaacgatctccaggaccatctgaatcatgcgcggatgacacgaactcacgacggcgatcacagacattaacccacagtacagacactgcgacaacgtggcaattcgtcgcaataccgtctcactgaactggccgataattgcagacg

SEQ ID NO: 1138 - DNA, 2836 bp, Artificial Sequence
  Synthetic Sequence
aacggatttacggctagctcagtcctaggtacaatgctagcgctagcaaagaggagaaaagatctatgcgctcacgcaactggtcccgcaccttgaccgaacgcagcggtggtaacggcgcagtggcggttttcatggcttgttatgactgtttttttggggtacagtctatgcctcgcgcatccaagcagcaagcgcgttacgccgtgggtcgatgtttgatgttatggagcagcaacgatgttacgcagcagggcagtcgccctaaaacaaagttaaacattatgcgcgaagcggtgatcgccgaagtatcgacccagctgtcggaggtggtgggggtcattgaacgtcacctgtaaccgaccttgctggccgtacattaatacggctccgcagtggatggcggcctgaagccacacagtgatattgatttgctggttacggtgaccgtacgccttgatgaaacaacgcgccgcgctttgatcaacgaccttttggaaacttcggcttcccctggagagagcgagattctccgcgctgtagaagtcaccattgttgtgcacgacgacatcattccgtggcgttatccagctaagcgcgaactgcaatttggagaatggcagcgcaatgacattcttgcgggtatcttcgagccagccacgatcgacattgatctggctatcttgctgacaaaagcacgcgaacatagcgttgccttggtaggtccagcggcggaggaactctttgatccggttcctgaacaggatctgtttgaggcgctgaatgaaaccttaacgctgtggaactcgccgcccgactgggctggcgatgagcgcaatgtagtgcttacgttgtcccgcatttggtacagcgcagtaaccggcaaaatcgcgccgaaggatgtcgctgccgactgggcaatggagcgcctgccggcccagtatcagcccgtcattcttgaagctcgccaggcttatcttggacaagaagaagatcgcttggcctcgcgcgcagatcagttggaagaatttgtccactacgtgaaaggcgagatcaccaaggtagtcggcaaataaggatcctaactcgagctcggtaccaaattccagaaaagaggcctcccgaaaggggggccttttttcgttttggtccgctgccaatgagacgacggggtcatcacggctcatcatgcgccaaacaaatgtgtgcaatacacgctcggatgactgcatgatgaccgcactgactggggacagcagatccacctaagcctgtgagagaagcagacacccgacagatcaaggcagttaactagtgcactgcagtacagcggccgctagcggagtgtatactggcttactatgttggcactgatgagggtgtcagtgaagtgcttcatgtggcaggagaaaaaaggctgcaccggtgcgtcagcagaatatgtgatacaggatatattccgcttcctcgctcactgactcgctacgctcggtcgttcgactgcggcgagcggaaatggcttacgaacggggcggagatttcctggaagatgccaggaagatacttaacagggaagtgagagggccgcggcaaagccgtttttccataggctccgcccccctgacaagcatcacgaaatctgacgctcaaatcagtggtggcgaaacccgacaggactataaagataccaggcgtttccccctggcggctccctcgtgcgctctcctgttcctgcctttcggtttaccggtgtcattccgctgttatggccgcgtttgtctcattccacgcctgacactcagttccgggtaggcagttcgctccaagctggactgtatgcacgaaccccccgttcagtccgaccgctgcgccttatccggtaactatcgtcttgagtccaacccggaaagacatgcaaaagcaccactggcagcagccactggtaattgatttagaggagttagtcttgaagtcatgcgccggttaaggctaaactgaaaggacaagttttggtgactgcgctcctccaagccagttacctcggttcaaagagttggtagctcagagaaccttcgaaaaaccgccctgcaaggcggttttttcgttttcagagcaagagattacgcgcagaccaaaacgatctcaagaagatcatcttattaatcagataaaatatttttgacagctagctcagtcctaggtataatgctagcgttaataaggagaaggaaaagtatgggtcaaagtagcgatgaagccaacgctcccgttgcagggcagtttgcgcttcccctgagtgccacctttggcttaggggatcgcgtacgcaagaaatctggtgccgcttggcagggtcaagtcgtcggttggtattgcacaaaactcactcctgaaggctatgcggtagagtccgaatcccacccaggctcagtgcaaatttatcctgtggctgcacttgaacgtgtggcctaaactgctcccggtcacactagaaaataaaaacagccgtgcctctttctggcaacggctgtttttatttattcaaccttaattaaggacagctattgtagataagtggggatactacgggtataaaaaaacccgccggggcgggtttttttacgttgcttcagagcggccgcccctgaattcgcatctagatggtagagccacaaacagccggtacaagcaacgatctccaggaccatctgaatcatgcgcggatgacacgaactcacgacggcgatcacagacattaacccacagtacagacactgcgacaacgtggcaattcgtcgcaataccgtctcactgaactggccgataattgcagacg

SEQ ID NO: 1139 - DNA, 4642 bp, Artificial Sequence
  Synthetic Sequence
  misc_feature (36)..(36): Insert 20 nucleotide gRNA protospacer at position 36.
  misc_feature (1262)..(1262): Insert Cas9 variant sequence at position 1262.
  misc_feature (1333)..(1333): Insert DNA polymerase variant sequence at position 1333.
tttatagctagctcagcccttggtacaatgctagcngttttagagctagaaatagcaagttaaaataaggctagtccgttatcaacttgaaaaagtggcaccgagtcggtgctttttttgaagcttgggcccgaacaaaaactcatctcagaagaggatctgaatagcgccgtcgaccatcatcatcatcatcattgagtttaaacggactccagcttggctgttttggcggatgagagaagattttcagcctgatacagattaaatcagaacgcagaagcggtctgataaaacagaatttgcctggcggcagtagcgcggtggtcccacctgaccccatgccgaactcagaagtgaaacgccgtagcgccgatggtagtgtggggactccccatgcgagagtagggaactgccaggcatcaaataaaacgaaaggctcagtcgaaagactgggcctttcgttttatctgttgtttgtcggtgaacgacagggctgccaaaccagatgtcaacacagctacaacgttaagacccactttcacatttaagttgtttttctaatccgcatatgatcaattcaaggccgaataagaaggctggctctgcaccttggtgatcaaataattcgatagcttgtcgtaataatggcggcatactatcagtagtaggtgtttccctttcttctttagcgacttgatgctcttgatcttccaatacgcaacctaaagtaaaatgccccacagcgctgagtgcatataatgcattctctagtgaaaaaccttgttggcataaaaaggctaattgattttcgagagtttcatactgtttttctgtaggccgtgtacctaaatgtacttttgctccatcgcgatgacttagtaaagcacatctaaaacttttagcgttattacgtaaaaaatcttgccagctttccccttctaaagggcaaaagtgagtatggtgcctatctaacatctcaatggctaaggcgtcgagcaaagcccgcttattttttacatgccaatacaatgtaggctgctctacacctagcttctgggcgagtttacgggttgttaaaccttcgattccgacctcattaagcagctctaatgcgctgttaatcactttacttttatctaatctagacatcattaattcctaatttttgttgacactctatcgttgatagagttattttaccactccctatcagtgatagagaaaagaattcaaaagatctaaagaggagaaaagatctatgntggttctagtgaaaccccgggaacaagtgagtcggccacccctgaaggtggatcagggggtagcggatccntaataatggcctcggtaccaaagacgaacaataagacgctgaaaagcgtcttttttcgttttggtccgctgagcagttacagagatgttacgaaccactagtgcactgcagtacagtgttacaaccaattaaccaattctgattagaaaaactcatcgagcatcaaatgaaactgcaatttattcatatcaggattatcaataccatatttttgaaaaagccgtttctgtaatgaaggagaaaactcaccgaggcagttccataggatggcaagatcctggtatcggtctgcgattccgactcgtccaacatcaatacaacctattaatttcccctcgtcaaaaataaggttatcaagtgagaaatcaccatgagtgacgactgaatccggtgagaatggcaaaagcttatgcatttctttccagacttgttcaacaggccagccattacgctcgtcatcaaaatcactcgcatcaaccaaaccgttattcattcgtgattgcgcctgagcgaggcgaaatacgcgatcgctgttaaaaggacaattacaaacaggaatcgaatgcaaccggcgcaggaacactgccagcgcatcaacaatattttcacctgaatcaggatattcttctaatacctggaatgctgttttcccggggatcgcagtggtgagtaaccatgcatcatcaggagtacggataaaatgcttgatggtcggaagaggcataaattccgtcagccagtttagtctgaccatctcatctgtaacatcattggcaacgctacctttgccatgtttcagaaacaactctggcgcatcgggcttcccatacaatcgatagattgtcgcacctgattgcccgacattatcgcgagcccatttatacccatataaatcagcatccatgttggaatttaatcgcggcctggagcaagacgtttcccgttgaatatggctcataacaccccttgtattactgtttatgtaagcagacagttttattgttcatgatgatatatttttatcttgtgcaatgtaacatcagagattttgagacacaacgtggctttgttgaataaatcgaacttttgctgagttgaaggatcaggagttcatgaccaaaatcccttaacgtgagttttcgttccactgagcgtcagaccccgtagaaaagatcaaaggatcttcttgagatcctttttttctgcgcgtaatctgctgcttgcaaacaaaaaaaccaccgctaccagcggtggtttgtttgccggatcaagagctaccaactctttttccgaaggtaactggcttcagcagagcgcagataccaaatactgtccttctagtgtagccgtagttaggccaccacttcaagaactctgtagcaccgcctacatacctcgctctgctaatcctgttaccagtggctgctgccagtggcgataagtcgtgtcttaccgggttggactcaagacgatagttaccggataaggcgcagcggtcgggctgaacggggggttcgtgcacacagcccagcttggagcgaacgacctacaccgaactgagatacctacagcgtgagctatgagaaagcgccacgcttcccgaagggagaaaggcggacaggtatccggtaagcggcagggtcggaacaggagagcgcacgagggagcttccagggggaaacgcctggtatctttatagtcctgtcgggtttcgccacctctgacttgagcgtcgatttttgtgatgctcgtcaggggggcggagcctatggaaaaacgccagcaacgcggcctttttacggttcctggccttttgctggccttttgctcacatgttctttcctgcgttatcccctgattctgtggataaccgtattaccgcctttgagtgagctgataccgctcgccgcagccgaacgaccgagcgcagcgagtcagtgagcgaggaagcggaagagcgcctgatgcggtattttctccttacgcatctgtgcggtatttcacaccgcaatggtgcactctcagtacaatctgctctgatgccgcatagttaagccagtatacactccgctatcgctacgtgactgggtcatggctgcgccccgacacccgccaacacccgctgacgcgccctgacgggcttgtctgctcccggcatccgcttacagacaagctgtgaccttctccgggagctgcatgtgtcagaggttttcaccgtcatcaccgaaacgcgcgaggcagctgcggtaaagctcatcagcgtggtcgtgaagcgattcacagatgtctgcctgttcatccgcgtccagctcgttgagtttctccagaagcgttaatgtctggcttctgataaagcgggccatgttaagggcggttttttcctgtttggtcactgatgcctccgtgtaagggggatttctgttcatccctgaattcgcatctagactgaactggccgataattgcagacgaacggatttactttacagctagctcagtcctaggtattatgctagcgctagcaaagaggagaaaagatctatggagaaaaaaatcactggatataccaccgttgatatatcccaatggcatcgtaaagaacattttgaggcatttcagtcagttgctcaatgtacctataaccagaccgttcagctggatattacggcctttttaaagaccgtaaagaaaaataagcacaagttttaaccggcctttattcacattcttgcccgcctgatgaatgctcatccggaatttcgtatggcaatgaaagacggtgagctggtgatatgggatagtgttcacccttgttacaccgttttccatgagcaaactgaaacgttttcatcgctctggagtgaataccacgacgatttccggcagtttctacacatatattcgcaagatgtggcgtgttacggtgaaaacctggcctatttccctaaagggtttattgagaatatgtttttcgtttcagccaatccctgggtgagtttcaccagttttgatttaaacgtggccaatatggacaacttcttcgcccccgttttcaccatgggcaaatattatacgcaaggcgacaaggtgctgatgccgctggcgattcaggttcatcatgccgtttgtgatggcttccatgtcggcagaatgcttaatgaattacaacagtactgcgatgagtggcagggcggggcgtaaggatcctaactcgagctcggtaccaaattccagaaaagaggcctcccgaaaggggggccttttttcgttttggtccgctgccaaaccagatgtcaacacagctacaacg

SEQ ID NO: 1140 - DNA, 9779 bp, Artificial Sequence
  Synthetic Sequence
  misc_feature (36)..(36): Insert 20 nucleotide gRNA protospacer at position 36.
  misc_feature (1262)..(1262): Insert Phi29 variant sequence at position 1262.
tttatagctagctcagcccttggtacaatgctagcngttttagagctagaaatagcaagttaaaataaggctagtccgttatcaacttgaaaaagtggcaccgagtcggtgctttttttgaagcttgggcccgaacaaaaactcatctcagaagaggatctgaatagcgccgtcgaccatcatcatcatcatcattgagtttaaacggactccagcttggctgttttggcggatgagagaagattttcagcctgatacagattaaatcagaacgcagaagcggtctgataaaacagaatttgcctggcggcagtagcgcggtggtcccacctgaccccatgccgaactcagaagtgaaacgccgtagcgccgatggtagtgtggggactccccatgcgagagtagggaactgccaggcatcaaataaaacgaaaggctcagtcgaaagactgggcctttcgttttatctgttgtttgtcggtgaacgacagggctgccaaaccagatgtcaacacagctacaacgttaagacccactttcacatttaagttgtttttctaatccgcatatgatcaattcaaggccgaataagaaggctggctctgcaccttggtgatcaaataattcgatagcttgtcgtaataatggcggcatactatcagtagtaggtgtttccctttcttctttagcgacttgatgctcttgatcttccaatacgcaacctaaagtaaaatgccccacagcgctgagtgcatataatgcattctctagtgaaaaaccttgttggcataaaaaggctaattgattttcgagagtttcatactgtttttctgtaggccgtgtacctaaatgtacttttgctccatcgcgatgacttagtaaagcacatctaaaacttttagcgttattacgtaaaaaatcttgccagctttccccttctaaagggcaaaagtgagtatggtgcctatctaacatctcaatggctaaggcgtcgagcaaagcccgcttattttttacatgccaatacaatgtaggctgctctacacctagcttctgggcgagtttacgggttgttaaaccttcgattccgacctcattaagcagctctaatgcgctgttaatcactttacttttatctaatctagacatcattaattcctaatttttgttgacactctatcgttgatagagttattttaccactccctatcagtgatagagaaaagaattcaaaagatctaaagaggagaaaagatctatgnggttctagtgaaaccccgggaacaagtgagtcggccacccctgaaggtggatcagggggtagcggatccgttcagatcccgcagaacccgctgattctggttgacggatctagttacctgtaccgtgcttaccatgctttcccgcctttgaccaattctgctggtgaacctacgggagctatgtacggagttctgaatatgttgcgttctttaattatgcagtacaagcctacccacgctgctgttgttttcgatgctaaaggtaagacgttccgcgacgagttattcgagcactataagtctcaccgtcctccgatgcctgatgacttacgcgctcagattgagccgctgcatgctatggtgaaggctatgggtttacctcttttggctgtcagcggtgttgaggctgatgatgtcattggcaccttagctcgtgaggctgagaaggctggtcgccctgttttgatttctaccggtgacaaggacatggctcaattggttaccccgaacatcaccctgatcaacaccatgaccaacacgattctgggtcctgaggaagttgttaacaaatatggtgttcctccggagttgattattgactttcttgctcttatgggcgattcttcagacaatatcccgggtgttccaggtgttggagagaagactgctcaagctctgcttcagggtctgggtggtttggacaccctttacgctgaaccggagaagatcgccggtctgtcttttcgcggtgctaagaccatggctgctaaactggaacagaataaggaggtcgcatacctgtcttatcaattggctaccatcaagacggatgtggagttagaacttacgtgcgagcagcttgaggttcaacagcctgctgctgaggaactgctgggtctttttaagaaatacgaatttaagcgttggaccgccgacgttgaggctggtaagtggctgcaagctaagggtgctaagccggctgctaaaccgcaagaaacgagtgtcgctgatgaggctccggaggttaccgctaccgttatcggttctagtgaaaccccgggaacaagtgagtcggccacccctgaaggtggatcagggggtagcggatccgacaagaagtattctatcggactggctatcgggactaatagcgtcgggtgggccgtgatcactgacgagtacaaggtgccctctaagaagttcaaggtgctcgggaacaccgaccggcattccatcaagaaaaatctgatcggagctctcctctttgattcaggggaaaccgctgaagcaacccgcctcaagcggactgctagacggcggtacaccaggaggaagaaccggatttgttaccttcaagagatattctccaacgaaatggcaaaggtcgacgacagcttcttccataggctggaagaatcattcctcgtggaagaggataagaagcatgaacggcatcccatcttcggtaatatcgtcgacgaggtggcctatcacgagaaatacccaaccatctaccatcttcgcaaaaagctggtggactcaaccgacaaggcagacctccggcttatctacctggccctggcccacatgatcaagttcagaggccacttcctgatcgagggcgacctcaatcctgacaatagcgatgtggataaactgttcatccagctggtgcagacttacaaccagctctttgaagagaaccccatcaatgcaagcggagtcgatgccaaggccattctgtcagcccggctgtcaaagagccgcagacttgagaatcttatcgctcagctgccgggtgaaaagaaaaatggactgttcgggaacctgattgctctttcacttgggctgactcccaatttcaagtctaatttcgacctggcagaggatgccaagctgcaactgtccaaggacacctatgatgacgatctcgacaacctcctggcccagatcggtgaccaatacgccgaccttttccttgctgctaagaatctttctgacgccatcctgctgtctgacattctccgcgtgaacactgaaatcaccaaggcccctctttcagcttcaatgattaagcggtatgatgagcaccaccaggacctgaccctgcttaaggcactcgtccggcagcagcttccggagaagtacaaggaaatcttctttgaccagtcaaagaatggatacgccggctacatcgacggaggtgcctcccaagaggaattttataagtttatcaaacctatccttgagaagatggacggcaccgaagagctcctcgtgaaactgaatcgggaggatctgctgcggaagcagcgcactttcgacaatgggagcattccccaccagatccatcttggggagcttcacgccatccttcggcgccaagaggacttctacccctttcttaaggacaacagggagaagattgagaaaattctcactttccgcatcccctactacgtgggacccctcgccagaggaaatagccggtttgcttggatgaccagaaagtcagaagaaactatcactccctggaacttcgaagaggtggtggacaagggagccagcgctcagtcattcatcgaacggatgactaacttcgataagaacctccccaatgagaaggtcctgccgaaacattccctgctctacgagtactttaccgtgtacaacgagctgaccaaggtgaaatatgtcaccgaagggatgaggaagcccgcattcctgtcaggcgaacaaaagaaggcaattgtggaccttctgttcaagaccaatagaaaggtgaccgtgaagcagctgaaggaggactatttcaagaaaattgaatgcttcgactctgtggagattagcggggtcgaagatcggttcaacgcaagcctgggtacttaccatgatctgcttaagatcatcaaggacaaggattttctggacaatgaggagaacgaggacatccttgaggacattgtcctgactctcactctgttcgaggaccgggaaatgatcgaggagaggcttaagacctacgcccatctgttcgacgataaagtgatgaagcaacttaaacggagaagatataccggatggggacgccttagccgcaaactcatcaacggaatccgggacaaacagagcggaaagaccattcttgatttccttaagagcgacggattcgctaatcgcaacttcatgcaacttatccatgatgattccctgacctttaaggaggacatccagaaggcccaagtgtctggacaaggtgactcactgcacgagcatatcgcaaatctggctggttcacccgctattaagaagggtattctccagaccgtgaaagtcgtggacgagctggtcaaggtgatgggtcgccataaaccagagaacattgtcatcgagatggccagggaaaaccagactacccagaagggacagaagaacagcagggagcggatgaaaagaattgaggaagggattaaggagctcgggtcacagatccttaaagagcacccggtggaaaacacccagcttcagaatgagaagctctatctgtactaccttcaaaatggacgcgatatgtatgtggaccaagagcttgatatcaacaggctctcagactacgacgtggaccatatcgtccctcagagcttcctcgcagacgactcaattgacaataaggtgctgactcgctcagacaagaaccggggaaagtcagataacgtgccctcagaggaagtcgtgaaaaagatgaagaactattggcgccagcttctgaacgcaaagctgatcactcagcggaagttcgacaatctcactaaggctgagaggggcggactgagcgaactggacaaagcaggattcattaaacggcaacttgtggagactcggcagattactaaacatgtcgcccaaatccttgactcacgcatgaataccaagtacgacgaaaacgacaaacttatccgcgaggtgaaggtgattaccctgaagtccaagctggtcagcgatttcagaaaggactttcaattctacaaagtgcgggagatcaataactatcatcatgctcatgacgcatatctgaatgccgtggtgggaaccgccctgatcaagaagtacccagcactggaaagcgagttcgtgtacggagactacaaggtctacgacgtgcgcaagatgattgccaaatctgagcaggagatcggaaaggccaccgcaaagtacttcttctacagcaacatcatgaatttcttcaagaccgaaatcacccttgcaaacggtgagatccggaaggcgccgctcatcgagactaatggggagactggcgaaatcgtgtgggacaagggcagagatttcgctaccgtgcgcaaagtgctttctatgcctcaagtgaacatcgtgaagaaaaccgaggtgcaaaccggaggcttttctaaggaatcaatcctccccaagcgcaactccgacaagctcattgcaaggaagaaggattgggaccctaagaagtacggcggattcgattcaccaactgtggcttattctgtcctggtcgtggctaaggtggaaaaaggaaagtctaagaagctcaagagcgtgaaggaactgctgggtatcaccattatggagcgcagctccttcgagaagaacccaattgactttctcgaagccaaaggttacaaggaagtcaagaaggaccttatcatcaagctcccaaagtatagcctgttcgaactggagaatgggcggaagcggatgctcgcctccgctggcgaacttcagaagggtaatgagctggctctcccctccaagtacgtgaatttcctctaccttgcaagccattacgagaagctgaaggggagccccgaggacaacgagcaaaagcaactgtttgtggagcagcataagcattatctggacgagatcattgagcagatttccgagttttctaaacgcgtcattctcgctgatgccaacctcgataaagtccttagcgcatacaataagcacagagacaaaccaattcgggagcaggctgagaatatcatccacctgttcaccctcaccaatcttggtgcccctgccgcattcaagtacttcgacaccaccatcgaccggaaacgctatacctccaccaaagaagtgctggacgccaccctcatccaccagagcatcaccggactttacgaaactcggattgacctctcacagctcggaggggattaatggcctcggtaccaaagacgaacaataagacgctgaaaagcgtcttttttcgttttggtccgctgagcagttacagagatgttacgaaccactagtgcactgcagtacagtgttacaaccaattaaccaattctgattagaaaaactcatcgagcatcaaatgaaactgcaatttattcatatcaggattatcaataccatatttttgaaaaagccgtttctgtaatgaaggagaaaactcaccgaggcagttccataggatggcaagatcctggtatcggtctgcgattccgactcgtccaacatcaatacaacctattaatttcccctcgtcaaaaataaggttatcaagtgagaaatcaccatgagtgacgactgaatccggtgagaatggcaaaagcttatgcatttctttccagacttgttcaacaggccagccattacgctcgtcatcaaaatcactcgcatcaaccaaaccgttattcattcgtgattgcgcctgagcgaggcgaaatacgcgatcgctgttaaaaggacaattacaaacaggaatcgaatgcaaccggcgcaggaacactgccagcgcatcaacaatattttcacctgaatcaggatattcttctaatacctggaatgctgttttcccggggatcgcagtggtgagtaaccatgcatcatcaggagtacggataaaatgcttgatggtcggaagaggcataaattccgtcagccagtttagtctgaccatctcatctgtaacatcattggcaacgctacctttgccatgtttcagaaacaactctggcgcatcgggcttcccatacaatcgatagattgtcgcacctgattgcccgacattatcgcgagcccatttatacccatataaatcagcatccatgttggaatttaatcgcggcctggagcaagacgtttcccgttgaatatggctcataacaccccttgtattactgtttatgtaagcagacagttttattgttcatgatgatatatttttatcttgtgcaatgtaacatcagagattttgagacacaacgtggctttgttgaataaatcgaacttttgctgagttgaaggatcaggagttcatgaccaaaatcccttaacgtgagttttcgttccactgagcgtcagaccccgtagaaaagatcaaaggatcttcttgagatcctttttttctgcgcgtaatctgctgcttgcaaacaaaaaaaccaccgctaccagcggtggtttgtttgccggatcaagagctaccaactctttttccgaaggtaactggcttcagcagagcgcagataccaaatactgtccttctagtgtagccgtagttaggccaccacttcaagaactctgtagcaccgcctacatacctcgctctgctaatcctgttaccagtggctgctgccagtggcgataagtcgtgtcttaccgggttggactcaagacgatagttaccggataaggcgcagcggtcgggctgaacggggggttcgtgcacacagcccagcttggagcgaacgacctacaccgaactgagatacctacagcgtgagctatgagaaagcgccacgcttcccgaagggagaaaggcggacaggtatccggtaagcggcagggtcggaacaggagagcgcacgagggagcttccagggggaaacgcctggtatctttatagtcctgtcgggtttcgccacctctgacttgagcgtcgatttttgtgatgctcgtcaggggggcggagcctatggaaaaacgccagcaacgcggcctttttacggttcctggccttttgctggccttttgctcacatgttctttcctgcgttatcccctgattctgtggataaccgtattaccgcctttgagtgagctgataccgctcgccgcagccgaacgaccgagcgcagcgagtcagtgagcgaggaagcggaagagcgcctgatgcggtattttctccttacgcatctgtgcggtatttcacaccgcaatggtgcactctcagtacaatctgctctgatgccgcatagttaagccagtatacactccgctatcgctacgtgactgggtcatggctgcgccccgacacccgccaacacccgctgacgcgccctgacgggcttgtctgctcccggcatccgcttacagacaagctgtgaccttctccgggagctgcatgtgtcagaggttttcaccgtcatcaccgaaacgcgcgaggcagctgcggtaaagctcatcagcgtggtcgtgaagcgattcacagatgtctgcctgttcatccgcgtccagctcgttgagtttctccagaagcgttaatgtctggcttctgataaagcgggccatgttaagggcggttttttcctgtttggtcactgatgcctccgtgtaagggggatttctgttcatccctgaattcgcatctagactgaactggccgataattgcagacgaacggatttactttacagctagctcagtcctaggtattatgctagcgctagcaaagaggagaaaagatctatggagaaaaaaatcactggatataccaccgttgatatatcccaatggcatcgtaaagaacattttgaggcatttcagtcagttgctcaatgtacctataaccagaccgttcagctggatattacggcctttttaaagaccgtaaagaaaaataagcacaagttttaaccggcctttattcacattcttgcccgcctgatgaatgctcatccggaatttcgtatggcaatgaaagacggtgagctggtgatatgggatagtgttcacccttgttacaccgttttccatgagcaaactgaaacgttttcatcgctctggagtgaataccacgacgatttccggcagtttctacacatatattcgcaagatgtggcgtgttacggtgaaaacctggcctatttccctaaagggtttattgagaatatgtttttcgtttcagccaatccctgggtgagtttcaccagttttgatttaaacgtggccaatatggacaacttcttcgcccccgttttcaccatgggcaaatattatacgcaaggcgacaaggtgctgatgccgctggcgattcaggttcatcatgccgtttgtgatggcttccatgtcggcagaatgcttaatgaattacaacagtactgcgatgagtggcagggcggggcgtaaggatcctaactcgagctcggtaccaaattccagaaaagaggcctcccgaaaggggggccttttttcgttttggtccgctgccaaaccagatgtcaacacagctacaacg

SEQ ID NO: 1141 - DNA, 4855 bp, Artificial Sequence
  Synthetic Sequence
  misc_feature (36)..(36): Insert 20 nucleotide gRNA protospacer at position 36.
  misc_feature (249)..(249): Insert 20 nucleotide gRNA protospacer at position 249.
  misc_feature (1475)..(1475): Insert Cas9 variant sequence at position 1475.
  misc_feature (1546)..(1546): Insert DNA polymerase variant sequence at position 1546.
tttatagctagctcagcccttggtacaatgctagcngttttagagctagaaatagcaagttaaaataaggctagtccgttatcaacttgaaaaagtggcaccgagtcggtgctttttttctcggtaccaaattccagaaaagaggcctcccgaaaggggggccttttttcgttttggtccgctgccaaaccagatgtcaacacagctacaacgtttatagctagctcagcccttggtacaatgctagcngttttagagctagaaatagcaagttaaaataaggctagtccgttatcaacttgaaaaagtggcaccgagtcggtgctttttttgaagcttgggcccgaacaaaaactcatctcagaagaggatctgaatagcgccgtcgaccatcatcatcatcatcattgagtttaaacggactccagcttggctgttttggcggatgagagaagattttcagcctgatacagattaaatcagaacgcagaagcggtctgataaaacagaatttgcctggcggcagtagcgcggtggtcccacctgaccccatgccgaactcagaagtgaaacgccgtagcgccgatggtagtgtggggactccccatgcgagagtagggaactgccaggcatcaaataaaacgaaaggctcagtcgaaagactgggcctttcgttttatctgttgtttgtcggtgaacgacagggctgccaaaccagatgtcaacacagctacaacgttaagacccactttcacatttaagttgtttttctaatccgcatatgatcaattcaaggccgaataagaaggctggctctgcaccttggtgatcaaataattcgatagcttgtcgtaataatggcggcatactatcagtagtaggtgtttccctttcttctttagcgacttgatgctcttgatcttccaatacgcaacctaaagtaaaatgccccacagcgctgagtgcatataatgcattctctagtgaaaaaccttgttggcataaaaaggctaattgattttcgagagtttcatactgtttttctgtaggccgtgtacctaaatgtacttttgctccatcgcgatgacttagtaaagcacatctaaaacttttagcgttattacgtaaaaaatcttgccagctttccccttctaaagggcaaaagtgagtatggtgcctatctaacatctcaatggctaaggcgtcgagcaaagcccgcttattttttacatgccaatacaatgtaggctgctctacacctagcttctgggcgagtttacgggttgttaaaccttcgattccgacctcattaagcagctctaatgcgctgttaatcactttacttttatctaatctagacatcattaattcctaatttttgttgacactctatcgttgatagagttattttaccactccctatcagtgatagagaaaagaattcaaaagatctaaagaggagaaaagatctatgntggttctagtgaaaccccgggaacaagtgagtcggccacccctgaaggtggatcagggggtagcggatccntaataatggcctcggtaccaaagacgaacaataagacgctgaaaagcgtcttttttcgttttggtccgctgagcagttacagagatgttacgaaccactagtgcactgcagtacagtgttacaaccaattaaccaattctgattagaaaaactcatcgagcatcaaatgaaactgcaatttattcatatcaggattatcaataccatatttttgaaaaagccgtttctgtaatgaaggagaaaactcaccgaggcagttccataggatggcaagatcctggtatcggtctgcgattccgactcgtccaacatcaatacaacctattaatttcccctcgtcaaaaataaggttatcaagtgagaaatcaccatgagtgacgactgaatccggtgagaatggcaaaagcttatgcatttctttccagacttgttcaacaggccagccattacgctcgtcatcaaaatcactcgcatcaaccaaaccgttattcattcgtgattgcgcctgagcgaggcgaaatacgcgatcgctgttaaaaggacaattacaaacaggaatcgaatgcaaccggcgcaggaacactgccagcgcatcaacaatattttcacctgaatcaggatattcttctaatacctggaatgctgttttcccggggatcgcagtggtgagtaaccatgcatcatcaggagtacggataaaatgcttgatggtcggaagaggcataaattccgtcagccagtttagtctgaccatctcatctgtaacatcattggcaacgctacctttgccatgtttcagaaacaactctggcgcatcgggcttcccatacaatcgatagattgtcgcacctgattgcccgacattatcgcgagcccatttatacccatataaatcagcatccatgttggaatttaatcgcggcctggagcaagacgtttcccgttgaatatggctcataacaccccttgtattactgtttatgtaagcagacagttttattgttcatgatgatatatttttatcttgtgcaatgtaacatcagagattttgagacacaacgtggctttgttgaataaatcgaacttttgctgagttgaaggatcaggagttcatgaccaaaatcccttaacgtgagttttcgttccactgagcgtcagaccccgtagaaaagatcaaaggatcttcttgagatcctttttttctgcgcgtaatctgctgcttgcaaacaaaaaaaccaccgctaccagcggtggtttgtttgccggatcaagagctaccaactctttttccgaaggtaactggcttcagcagagcgcagataccaaatactgtccttctagtgtagccgtagttaggccaccacttcaagaactctgtagcaccgcctacatacctcgctctgctaatcctgttaccagtggctgctgccagtggcgataagtcgtgtcttaccgggttggactcaagacgatagttaccggataaggcgcagcggtcgggctgaacggggggttcgtgcacacagcccagcttggagcgaacgacctacaccgaactgagatacctacagcgtgagctatgagaaagcgccacgcttcccgaagggagaaaggcggacaggtatccggtaagcggcagggtcggaacaggagagcgcacgagggagcttccagggggaaacgcctggtatctttatagtcctgtcgggtttcgccacctctgacttgagcgtcgatttttgtgatgctcgtcaggggggcggagcctatggaaaaacgccagcaacgcggcctttttacggttcctggccttttgctggccttttgctcacatgttctttcctgcgttatcccctgattctgtggataaccgtattaccgcctttgagtgagctgataccgctcgccgcagccgaacgaccgagcgcagcgagtcagtgagcgaggaagcggaagagcgcctgatgcggtattttctccttacgcatctgtgcggtatttcacaccgcaatggtgcactctcagtacaatctgctctgatgccgcatagttaagccagtatacactccgctatcgctacgtgactgggtcatggctgcgccccgacacccgccaacacccgctgacgcgccctgacgggcttgtctgctcccggcatccgcttacagacaagctgtgaccttctccgggagctgcatgtgtcagaggttttcaccgtcatcaccgaaacgcgcgaggcagctgcggtaaagctcatcagcgtggtcgtgaagcgattcacagatgtctgcctgttcatccgcgtccagctcgttgagtttctccagaagcgttaatgtctggcttctgataaagcgggccatgttaagggcggttttttcctgtttggtcactgatgcctccgtgtaagggggatttctgttcatccctgaattcgcatctagactgaactggccgataattgcagacgaacggatttactttacagctagctcagtcctaggtattatgctagcgctagcaaagaggagaaaagatctatggagaaaaaaatcactggatataccaccgttgatatatcccaatggcatcgtaaagaacattttgaggcatttcagtcagttgctcaatgtacctataaccagaccgttcagctggatattacggcctttttaaagaccgtaaagaaaaataagcacaagttttaaccggcctttattcacattcttgcccgcctgatgaatgctcatccggaatttcgtatggcaatgaaagacggtgagctggtgatatgggatagtgttcacccttgttacaccgttttccatgagcaaactgaaacgttttcatcgctctggagtgaataccacgacgatttccggcagtttctacacatatattcgcaagatgtggcgtgttacggtgaaaacctggcctatttccctaaagggtttattgagaatatgtttttcgtttcagccaatccctgggtgagtttcaccagttttgatttaaacgtggccaatatggacaacttcttcgcccccgttttcaccatgggcaaatattatacgcaaggcgacaaggtgctgatgccgctggcgattcaggttcatcatgccgtttgtgatggcttccatgtcggcagaatgcttaatgaattacaacagtactgcgatgagtggcagggcggggcgtaaggatcctaactcgagctcggtaccaaattccagaaaagaggcctcccgaaaggggggccttttttcgttttggtccgctgccaaaccagatgtcaacacagctacaacg

SEQ ID NO: 1142 - protein, 1367 aa, Artificial Sequence
  Synthetic Sequence
DKKYSIGLAIGTNSVGWAVITDEYKVPSKKFKVLGNTDRHSIKKNLIGALLFDSGETAEATRLKRTARRRYTRRKNRICYLQEIFSNEMAKVDDSFFHRLEESFLVEEDKKHERHPIFGNIVDEVAYHEKYPTIYHLRKKLVDSTDKADLRLIYLALAHMIKFRGHFLIEGDLNPDNSDVDKLFIQLVQTYNQLFEENPINASGVDAKAILSARLSKSRRLENLIAQLPGEKKNGLFGNLIALSLGLTPNFKSNFDLAEDAKLQLSKDTYDDDLDNLLAQIGDQYADLFLAAKNLSDAILLSDILRVNTEITKAPLSASMIKRYDEHHQDLTLLKALVRQQLPEKYKEIFFDQSKNGYAGYIDGGASQEEFYKFIKPILEKMDGTEELLVKLNREDLLRKQRTFDNGSIPHQIHLGELHAILRRQEDFYPFLKDNREKIEKILTFRIPYYVGPLARGNSRFAWMTRKSEETITPWNFEEVVDKGASAQSFIERMTNFDKNLPNEKVLPKHSLLYEYFTVYNELTKVKYVTEGMRKPAFLSGEQKKAIVDLLFKTNRKVTVKQLKEDYFKKIECFDSVEISGVEDRFNASLGTYHDLLKIIKDKDFLDNEENEDILEDIVLTLTLFEDREMIEERLKTYAHLFDDKVMKQLKRRRYTGWGRLSRKLINGIRDKQSGKTILDFLKSDGFANRNFMQLIHDDSLTFKEDIQKAQVSGQGDSLHEHIANLAGSPAIKKGILQTVKVVDELVKVMGRHKPENIVIEMARENQTTQKGQKNSRERMKRIEEGIKELGSQILKEHPVENTQLQNEKLYLYYLQNGRDMYVDQELDINRLSDYDVDHIVPQSFLKDDSIDNKVLTRSDKNRGKSDNVPSEEVVKKMKNYWRQLLNAKLITQRKFDNLTKAERGGLSELDKAGFIKRQLVETRQITKHVAQILDSRMNTKYDENDKLIREVKVITLKSKLVSDFRKDFQFYKVREINNYHHAHDAYLNAVVGTALIKKYPKLESEFVYGDYKVYDVRKMIAKSEQEIGKATAKYFFYSNIMNFFKTEITLANGEIRKRPLIETNGETGEIVWDKGRDFATVRKVLSMPQVNIVKKTEVQTGGFSKESILPKRNSDKLIARKKDWDPKKYGGFDSPTVAYSVLVVAKVEKGKSKKLKSVKELLGITIMERSSFEKNPIDFLEAKGYKEVKKDLIIKLPKYSLFELENGRKRMLASAGELQKGNELALPSKYVNFLYLASHYEKLKGSPEDNEQKQLFVEQHKHYLDEIIEQISEFSKRVILADANLDKVLSAYNKHRDKPIREQAENIIHLFTLTNLGAPAAFKYFDTTIDRKRYTSTKEVLDATLIHQSITGLYETRIDLSQLGGD

SEQ ID NO: 1143 - protein, 1367 aa, Artificial Sequence
  Synthetic Sequence
DKKYSIGLAIGTNSVGWAVITDEYKVPSKKFKVLGNTDRHSIKKNLIGALLFDSGETAEATRLKRTARRRYTRRKNRICYLQEIFSNEMAKVDDSFFHRLEESFLVEEDKKHERHPIFGNIVDEVAYHEKYPTIYHLRKKLVDSTDKADLRLIYLALAHMIKFRGHFLIEGDLNPDNSDVDKLFIQLVQTYNQLFEENPINASGVDAKAILSARLSKSRRLENLIAQLPGEKKNGLFGNLIALSLGLTPNFKSNFDLAEDAKLQLSKDTYDDDLDNLLAQIGDQYADLFLAAKNLSDAILLSDILRVNTEITKAPLSASMIKRYDEHHQDLTLLKALVRQQLPEKYKEIFFDQSKNGYAGYIDGGASQEEFYKFIKPILEKMDGTEELLVKLNREDLLRKQRTFDNGSIPHQIHLGELHAILRRQEDFYPFLKDNREKIEKILTFRIPYYVGPLARGNSRFAWMTRKSEETITPWNFEEVVDKGASAQSFIERMTNFDKNLPNEKVLPKHSLLYEYFTVYNELTKVKYVTEGMRKPAFLSGEQKKAIVDLLFKTNRKVTVKQLKEDYFKKIECFDSVEISGVEDRFNASLGTYHDLLKIIKDKDFLDNEENEDILEDIVLTLTLFEDREMIEERLKTYAHLFDDKVMKQLKRRRYTGWGRLSRKLINGIRDKQSGKTILDFLKSDGFANRNFMQLIHDDSLTFKEDIQKAQVSGQGDSLHEHIANLAGSPAIKKGILQTVKVVDELVKVMGRHKPENIVIEMARENQTTQKGQKNSRERMKRIEEGIKELGSQILKEHPVENTQLQNEKLYLYYLQNGRDMYVDQELDINRLSDYDVDHIVPQSFLADDSIDNKVLTRSDKNRGKSDNVPSEEVVKKMKNYWRQLLNAKLITQRKFDNLTKAERGGLSELDKAGFIKRQLVETRQITKHVAQILDSRMNTKYDENDKLIREVKVITLKSKLVSDFRKDFQFYKVREINNYHHAHDAYLNAVVGTALIKKYPALESEFVYGDYKVYDVRKMIAKSEQEIGKATAKYFFYSNIMNFFKTEITLANGEIRKAPLIETNGETGEIVWDKGRDFATVRKVLSMPQVNIVKKTEVQTGGFSKESILPKRNSDKLIARKKDWDPKKYGGFDSPTVAYSVLVVAKVEKGKSKKLKSVKELLGITIMERSSFEKNPIDFLEAKGYKEVKKDLIIKLPKYSLFELENGRKRMLASAGELQKGNELALPSKYVNFLYLASHYEKLKGSPEDNEQKQLFVEQHKHYLDEIIEQISEFSKRVILADANLDKVLSAYNKHRDKPIREQAENIIHLFTLTNLGAPAAFKYFDTTIDRKRYTSTKEVLDATLIHQSITGLYETRIDLSQLGGD

SEQ ID NO: 1144 - protein, 927 aa, Artificial Sequence
  Synthetic Sequence
VQIPQNPLILVDGSSYLYRAYHAFPPLTNSAGEPTGAMYGVLNMLRSLIMQYKPTHAAVVFDAKGKTFRDELFEHYKSHRPPMPDDLRAQIEPLHAMVKAMGLPLLAVSGVEADDVIGTLAREAEKAGRPVLISTGDKDMAQLVTPNITLINTMTNTILGPEEVVNKYGVPPELIIDFLALMGDSSDNIPGVPGVGEKTAQALLQGLGGLDTLYAEPEKIAGLSFRGAKTMAAKLEQNKEVAYLSYQLATIKTDVELELTCEQLEVQQPAAEELLGLFKKYEFKRWTADVEAGKWLQAKGAKPAAKPQETSVADEAPEVTATVISYDNYVTILDEETLKAWIAKLEKAPVFAFDTETDSLDNISANLVGLSFAIEPGVAAYIPVAHDYLDAPDQISRERALELLKPLLEDEKALKVGQNLKYARGILANYGIELRGIAFDTMLESYILNSVAGRHDMDSLAERWLKHKTITFEEIAGKGKNQLTFNQIALEEAGRYAAEDADVTLQLHLKMWPDLQKHKGPLNVFENIEMPLVPVLSRIERNGVKIDPKVLHNHSEELTLRLAELEKKAHEIAGEEFNLSSTKQLQTILFEKQGIKPLKKTPGGAPSTSEEVLEELALDYPLPKVILEYRGLAKLKSTYTDKLPLMINPKTGRVHTSYHQAVTATGRLSSTDPNLQNIPVRNEEGRRIRQAFIAPEDYVIVSADYSQIELRIMAHLSRDKGLLTAFAEGKDIHRATAAEVFGLPLETVTSEQRRSAKAINFGLIYGMSAFGLARQLNIPRKEAQKYMDLYFERYPGVLEYMERTRAQAKEQGYVETLDGRRLYLPDIKSSNGARRAAAERAAINAPMQGTAADIIKRAMIAVDAWLQAEQPRVRMIMQVHDELVFEVHKDDVDAVAKQIHQLMENCTRLDVPLLVEVGSGENWDQAH

SEQ ID NO: 1145 - protein, 927 aa, Artificial Sequence
  Synthetic Sequence
VQIPQNPLILVDGSSYLYRAYHAFPPLTNSAGEPTGAMYGVLNMLRSLIMQYKPTHAAVVFDAKGKTFRDELFEHYKSHRPPMPDDLRAQIEPLHAMVKAMGLPLLAVSGVEADDVIGTLAREAEKAGRPVLISTGDKDMAQLVTPNITLINTMTNTILGPEEVVNKYGVPPELIIDFLALMGDSSDNIPGVPGVGEKTAQALLQGLGGLDTLYAEPEKIAGLSFRGAKTMAAKLEQNKEVAYLSYQLATIKTDVELELTCEQLEVQQPAAEELLGLFKKYEFKRWTADVEAGKWLQAKGAKPAAKPQETSVADEAPEVTATVISYDNYVTILDEETLKAWIAKLEKAPVFAFDTETDSLDNISANLVGLSFAIEPGVAAYIPVAHDYLDAPDQISRERALELLKPLLEDEKALKVGQNLKYARGILANYGIELRGIAFDTMLESYILNSVAGRHDMDSLAERWLKHKTITFEEIAGKGKNQLTFNQIALEEAGRYAAEDADVTLQLHLKMWPDLQKHKGPLNVFENIEMPLVPVLSRIERNGVKIDPKVLHNHSEELTLRLAELEKKAHEIAGEEFNLSSTKQLQTILFEKQGIKPLKKTPGGAPSTSEEVLEELALDYPLPKVILEYRGLAKLKSTYTDKLPLMINPKTGRVHTSYHQAVTATGRLSSTDPNLQNIPVRNEEGRRIRQAFIAPEDYVIVSADYSQNELRIMAHLSRDKGLLTAFAEGKDIHRATAAEVFGLPLETVTSEQRRSAKAINFGLIYGMSAFGLARQLNIPRKEAQKYMDLYFERYPGVLEYMERTRAQAKEQGYVETLDGRRLYLPDIKSSNGARRAAAERAAINAPMQGTAADIIKRAMIAVDAWLQAEQPRVRMIMQVHDELVFEVHKDDVDAVAKQIHQLMENCTRLDVPLLVEVGSGENWDQAH

SEQ ID NO: 1146 - protein, 927 aa, Artificial Sequence
  Synthetic Sequence
VQIPQNPLILVDGSSYLYRAYHAFPPLTNSAGEPTGAMYGVLNMLRSLIMQYKPTHAAVVFDAKGKTFRDELFEHYKSHRPPMPDDLRAQIEPLHAMVKAMGLPLLAVSGVEADDVIGTLAREAEKAGRPVLISTGDKDMAQLVTPNITLINTMTNTILGPEEVVNKYGVPPELIIDFLALMGDSSDNIPGVPGVGEKTAQALLQGLGGLDTLYAEPEKIAGLSFRGAKTMAAKLEQNKEVAYLSYQLATIKTDVELELTCEQLEVQQPAAEELLGLFKKYEFKRWTADVEAGKWLQAKGAKPAAKPQETSVADEAPEVTATVISYDNYVTILDEETLKAWIAKLEKAPVFAFDTETDSLDNISANLVGLSFAIEPGVAAYIPVAHDYLDAPDQISRERALELLKPLLEDEKALKVGQNLKYARGILANYGIELRGIAFDTMLESYILNSVAGRHDMDSLAERWLKHKTITFEEIAGKGKNQLTFNQIALEEAGRYAAEDADVTLQLHLKMWPDLQKHKGPLNVFENIEMPLVPVLSRIERNGVKIDPKVLHNHSEELTLRLAELEKKAHEIAGEEFNLSSTKQLQTILFEKQGIKPLKKTPGGAPSTSEEVLEELALDYPLPKVILEYRGLAKLKSTYTDKLPLMINPKTGRVHTSYHQAVTATGRLSSTDPNLQNIPVRNEEGRRIRQAFIAPEDYVIVSADYSQNELRIMAHLSRDKGLLTAFAEGKDIHRATAAEVFGLPLETVTSEQRRSAKRINFGLIYGMSAFGLARQLNIPRKEAQKYMDLYFERYPGVLEYMERTRAQAKEQGYVETLDGRRLYLPDIKSSNGARRAAAERAAINAPMQGTAADIIKRAMIAVDAWLQAEQPRVRMIMQVHDELVFEVHKDDVDAVAKQIHQLMENCTRLDVPLLVEVGSGENWDQAH

SEQ ID NO: 1147 - protein, 927 aa, Artificial Sequence
  Synthetic Sequence
VQIPQNPLILVDGSSYLYRAYHAFPPLTNSAGEPTGAMYGVLNMLRSLIMQYKPTHAAVVFDAKGKTFRDELFEHYKSHRPPMPDDLRAQIEPLHAMVKAMGLPLLAVSGVEADDVIGTLAREAEKAGRPVLISTGDKDMAQLVTPNITLINTMTNTILGPEEVVNKYGVPPELIIDFLALMGDSSDNIPGVPGVGEKTAQALLQGLGGLDTLYAEPEKIAGLSFRGAKTMAAKLEQNKEVAYLSYQLATIKTDVELELTCEQLEVQQPAAEELLGLFKKYEFKRWTADVEAGKWLQAKGAKPAAKPQETSVADEAPEVTATVISYDNYVTILDEETLKAWIAKLEKAPVFAFDTETDSLDNISANLVGLSFAIEPGVAAYIPVAHDYLDAPDQISRERALELLKPLLEDEKALKVGQNLKYARGILANYGIELRGIAFDTMLESYILNSVAGRHDMDSLAERWLKHKTITFEEIAGKGKNQLTFNQIALEEAGRYAAEDADVTLQLHLKMWPDLQKHKGPLNVFENIEMPLVPVLSRIERNGVKIDPKVLHNHSEELTLRLAELEKKAHEIAGEEFNLSSTKQLQTILFEKQGIKPLKKTPGGAPSTSEEVLEELALDYPLPKVILEYRGLAKLKSTYTDKLPLMINPKTGRVHTSYHQAVTATGRLSSTDPNLQNIPVRNEEGRRIRQAFIAPEDYVIVSADYSQNELRIMAHLSRDKGLLTAFAEGKDIHRATAAEVYGLPLETVTSEQRRSAKRINFGLIYGMSAFGLARQLNIPRKEAQKYMDLYFERYHGVLEYMERTRAQAKEQGYVETLDGRRLYLPDIKSSNGARRAAAERAAINAPMQGTAADIIKRAMIAVDAWLQAEQPRVRMIMQVHDELVFEVHKDDVDAVAKQIHQLMENCTRLDVPLLVEVGSGENWDQAH

SEQ ID NO: 1148 - protein, 996 aa, Artificial Sequence
  Synthetic Sequence
VQIPQNPLILVDGSSYLYRAYHAFPPLTNSAGEPTGAMYGVLNMLRSLIMQYKPTHAAVVFDAKGKTFRDELFEHYKSHRPPMPDDLRAQIEPLHAMVKAMGLPLLAVSGVEADDVIGTLAREAEKAGRPVLISTGDKDMAQLVTPNITLINTMTNTILGPEEVVNKYGVPPELIIDFLALMGDSSDNIPGVPGVGEKTAQALLQGLGGLDTLYAEPEKIAGLSFRGAKTMAAKLEQNKEVAYLSYQLATIKTDVELELTCEQLEVQQPAAEELLGLFKKYEFKRWTADVEAGKWLQAKGAKPAAKPQETSVADEAPEVTATVISYDNYVTILDEETLKAWIAKLEKAPVFAFDTETDSLDNISANLVGLSFAIEPGVAAYIPVAHDYLDAPDQISRERALELLKPLLEDEKALKVGQNLKYARGILANYGIELRGIAFDTMLESYILNSVAGRHDMDSLAERWLKHKTITFEEIAGKGKNQLTFNQIALEEAGRYAAEDADVTLQLHLKMWPDLQKHKGPLNVFENIEMPLVPVLSRIERNGVKIDPKVLHNHSEELTLRLAELEKKATETFGSWYQPKGGTEMFCHPRTGKPLPKYPRIKTPKVGGIFKKPKNKAQREGREPCELDTREYVAGAPYTPVEHVVFNLSSTKQLQTILFEKQGIKPLKKTPGGAPSTSEEVLEELALDYPLPKVILEYRGLAKLKSTYTDKLPLMINPKTGRVHTSYHQAVTATGRLSSTDPNLQNIPVRNEEGRRIRQAFIAPEDYVIVSADYSQNELRIMAHLSRDKGLLTAFAEGKDIHRATAAEVFGLPLETVTSEQRRSAKRINFGLIYGMSAFGLARQLNIPRKEAQKYMDLYFERYPGVLEYMERTRAQAKEQGYVETLDGRRLYLPDIKSSNGARRAAAERAAINAPMQGTAADIIKRAMIAVDAWLQAEQPRVRMIMQVHDELVFEVHKDDVDAVAKQIHQLMENCTRLDVPLLVEVGSGENWDQAH

SEQ ID NO: 1149 - protein, 574 aa, Artificial Sequence
  Synthetic Sequence
KHMPRKMYSCDFETTTKVEDCRVWAYGYMNIEDHSEYKIGNSLDEFMAWVLKVQADLYFHDLKFDGAFIINWLERNGFKWSADGLPNTYNTIISRMGQWYMIDICLGYKGKRKIHTVIYDSLKKLPFPVKKIAKDFKLTVLKGDIDYHKERPVGYKITPEEYAYIKNDIQIIAEALLIQFKQGLDRMTAGSDSLKGFKDIITTKKFKKVFPTLSLGLDKEVRYAYRGGFTWLNDRFKEKEIGEGMVFDVNSLYPAQMYSRLLPYGEPIVFEGKYVWDEDYPLHIQHIRCEFELKEGYIPTIQIKRSRFYKGNEYLKSSGGEIADLWLSNVDLELMKEHYDLYNVEYISGLKFKATTGLFKDFIDKWTYIKTTSEGAIKQLAKLMLNSLYGKFASNPDVTGKVPYLKENGALGFRLGEEETKDPVYTPMGVFITAWARYTTITAAQACYDRIIYCDTDSIHLTGTEIPDVIKDIVDPKKLGYWAHESTFKRAKYLRQKTYIQDIYMKEVDGKLVEGSPDDYTDIKFSVKCAGMTDKIKKEVTFENFKVGFSRKMKPKPVQVPGGVVLVDDTFTIK

SEQ ID NO: 1150 - protein, 574 aa, Artificial Sequence
  Synthetic Sequence
KHMPRKMYSCDFETTTKVEDCRVWAYGYMNIEDHSEYKIGNSLDEFMAWVLKVQADLYFHDLKFDGAFIINWLERNGFKWSADGLPNTYNTIISRMGQWYMIDICLGYKGKRKIHTVIYDSLKKLPFPVKKIAKDFKLTVLKGDIDYHKERPVGYKITPEEYAYIKNDIQIIAEALLIQFKQGLDRMTAGSDSLKGFKDIITTKKFKKVFPTLSLGLDKEVRYAYRGGFTWLNDRFKEKEIGEGMVFDVNSLYPAQMYSRLLPYGEPIVFEGKYVWDEDYPLHIQHIRCEFELKEGYIPTIQIKRSRFYKGNEYLKSSGGEIADLWLSNVDLELMKEHYDLYNVEYISGLKFKATTGLFKDFIDKWTYIKTTSEGAIKQLAKRMLNSLYGKFASNPDVTGKVPYLKENGALGFRLGEEETKDPVYTPMGVFITAWARYTTITAAQACYDRIIYCDTDSIHLTGTEIPDVIKDIVDPKKLGYWAHESTFKRAKYLRQKTYIQDIYMKEVDGKLVEGSPDDYTDIKFSVKCAGMTDKIKKEVTFENFKVGFSRKMKPKPVQVPGGVVLVDDTFTIK

SEQ ID NO: 1151 - protein, 574 aa, Artificial Sequence
  Synthetic Sequence
KHMPRKRYSCDFETTTKVEDCRVWAYGYMNIEDHSEYKIGNSLDEFMAWALKVQADLYFHDLKFDGAFIINWLERNGFKWSADGLPNTYNTIISRTGQWYMIDICLGYKGKRKIHTVIYDSLKKLPFPVKKIAKDFKLTVLKGDIDYHKERPVGYKITPEEYAYIKNDIQIIAEALLIQFKQGLDRMTAGSDSLKDFKDIITTKKFKKVFPTLSLGLDKKVRYAYRGGFTWLNDRFKEKEIGEGMVFDVNSLYPAQMYSRLLPYGEPIVFEGKYVWDEDYPLHIQHIRCEFELKEGYIPTIQIKRSRFYKGNEYLKSSGGEIADLWLSNVDLELMKEHYDLYNVEYISGLKFKATTGLFKDFIDKWTYIKTTSEGAIKQLAKLMLNSLYGKFASNPDVTGKVPYLKENGALGFRLGEEETKDPVYTPMGVFITAWARYTTITAAQACYDRIIYCDTDSIHLTGTEIPDVIKDIVDPKKLGYWAHESTFKRAKYLRPKTYIQDIYMKEVDGKLVEGSPDDYTDIKLSVKCAGMTDKIKKEVTFENFKVGFSRKMKPKPVQVPGGVVLVDDTFTIK

SEQ ID NO: 1152 - protein, 574 aa, Artificial Sequence
  Synthetic Sequence
KHMPRKRYSCDFETTTKVEDCRVWAYGYMNIEDHSEYKIGNSLDEFMAWALKVQADLYFHDLKFDGAFIINWLERNGFKWSADGLPNTYNTIISRTGQWYMIDICLGYKGKRKIHTVIYDSLKKLPFPVKKIAKDFKLTVLKGDIDYHKERPVGYKITPEEYAYIKNDIQIIAEALLIQFKQGLDRMTAGSDSLKDFKDIITTKKFKKVFPTLSLGLDKKVRYAYRGGFTWLNDRFKEKEIGEGMVFDVNSLYPAQMYSRLLPYGEPIVFEGKYVWDEDYPLHIQHIRCEFELKEGYIPTIQIKRSRFYKGNEYLKSSGGEIADLWLSNVDLELMKEHYDLYNVEYISGLKFKATTGLFKDFIDKWTYIKTTSEGAIKQLAKRMLNSLYGKFASNPDVTGKVPYLKENGALGFRLGEEETKDPVYTPMGVFITAWARYTTITAAQACYDRIIYCDTDSIHLTGTEIPDVIKDIVDPKKLGYWAHESTFKRAKYLRPKTYIQDIYMKEVDGKLVEGSPDDYTDIKLSVKCAGMTDKIKKEVTFENFKVGFSRKMKPKPVQVPGGVVLVDDTFTIK

SEQ ID NO: 1153 - protein, 123 aa, Artificial Sequence
  Synthetic Sequence
ENTNIVKATFDTETLEGQIKIFNAQTGGGQSFKNLPDGTIIEANAIAQYKQVSDTYGDAKEETVTTIFAADGSLYSAISKTVAEAASDLIDLVTRHKLETFKVKVVQGTSSKGNVFFSLQLSL

SEQ ID NO: 1154 - protein, 5 aa, Artificial sequence
  Synthetic polypeptide
GSGGS

SEQ ID NO: 1155 - protein, 6 aa, Artificial sequence
  Synthetic polypeptide
GGSGGS

SEQ ID NO: 1156 - protein, 4 aa, Artificial sequence
  Synthetic polypeptide
GGGS

SEQ ID NO: 1157 - protein, 4 aa, Artificial sequence
  Synthetic polypeptide
GGSG

SEQ ID NO: 1158 - protein, 5 aa, Artificial sequence
  Synthetic polypeptide
GGSGG

SEQ ID NO: 1159 - protein, 5 aa, Artificial sequence
  Synthetic polypeptide
GSGSG

SEQ ID NO: 1160 - protein, 5 aa, Artificial sequence
  Synthetic polypeptide
GSGGG

SEQ ID NO: 1161 - protein, 5 aa, Artificial sequence
  Synthetic polypeptide
GGGSG

SEQ ID NO: 1162 - protein, 5 aa, Artificial sequence
  Synthetic polypeptide
GSSSG

SEQ ID NO: 1163 - protein, 335 aa, Homo sapiens
MSKRKAPQETLNGGITDMLTELANFEKNVSQAIHKYNAYRKAASVIAKYPHKIKSGAEAKKLPGVGTKIAEKIDEFLATGKLRKLEKIRQDDTSSSINFLTRVSGIGPSAARKFVDEGIKTLEDLRKNEDKLNHHQRIGLKYFGDFEKRIPREEMLQMQDIVLNEVKKVDSEYIATVCGSFRRGAESSGDMDVLLTHPSFTSESTKQPKLLHQVVEQLQKVHFITDTLSKGETKFMGVCQLPSKNDEKEYPHRRIDIRLIPKDQYYCGVLYFTGSDIFNKNMRAHALEKGFTINEYTIRPLGVTGVAGEPLPVDSEKDIFDYIQWKYREPKDRSE

SEQ ID NO: 1164 - protein, 740 aa, Homo sapiens
MEKLGVEPEEEGGGDDDEEDAEAWAMELADVGAAASSQGVHDQVLPTPNASSRVIVHVDLDCFYAQVEMISNPELKDKPLGVQQKYLVVTCNYEARKLGVKKLMNVRDAKEKCPQLVLVNGEDLTRYREMSYKVTELLEEFSPVVERLGFDENFVDLTEMVEKRLQQLQSDELSAVTVSGHVYNNQSINLLDVLHIRLLVGSQIAAEMREAMYNQLGLTGCAGVASNKLLAKLVSGVFKPNQQTVLLPESCQHLIHSLNHIKEIPGIGYKTAKCLEALGINSVRDLQTFSPKILEKELGISVAQRIQKLSFGEDNSPVILSGPPQSFSEEDSFKKCSSEVEAKNKIEELLASLLNRVCQDGRKPHTVRLIIRRYSSEKHYGRESRQCPIPSHVIQKLGTGNYDVMTPMVDILMKLFRNMVNVKMPFHLTLLSVCFCNLKALNTAKKGLIDYYLMPSLSTTSRSGKHSFKMKDTHMEDFPKDKETNRDFLPSGRIESTRTRESPLDTTNFSKEKDINEFPLCSLPEGVDQEVFKQLPVDIQEEILSGKSREKFQGKGSVSCPLHASRGVLSFFSKKQMQDIPINPRDHLSSSKQVSSVSPCEPGTSGFNSSSSSYMSSQKDYSYYLDNRLKDERISQGPKEPQGFHFTNSNPAVSAFHSFPNLQSEQLFSRNHTTDSHKQTVATDSHEGLTENREPDSVDEKITFPSDIDPQVFYELPEAVQKELLAEWKRAGSDFHIGHK

SEQ ID NO: 1165 - protein, 445 aa, Homo sapiens
MEKLGVEPEEEGGGDDDEEDAEAWAMELADVGAAASSQGVHDQVLPTPNASSRVIVHVDLDCFYAQVEMISNPELKDKPLGVQQKYLVVTCNYEARKLGVKKLMNVRDAKEKCPQLVLVNGEDLTRYREMSYKVTELLEEFSPVVERLGFDENFVDLTEMVEKRLQQLQSDELSAVTVSGHVYNNQSINLLDVLHIRLLVGSQIAAEMREAMYNQLGLTGCAGVASNKLLAKLVSGVFKPNQQTVLLPESCQHLIHSLNHIKEIPGIGYKTAKCLEALGINSVRDLQTFSPKILEKELGISVAQRIQKLSFGEDNSPVILSGPPQSFSEEDSFKKCSSEVEAKNKIEELLASLLNRVCQDGRKPHTVRLIIRRYSSEKHYGRESRQCPIPSHVIQKLGTGNYDVMTPMVDILMKLFRNMVNVKMPFHLTLLSVCFCNLKALNTAK

SEQ ID NO: 1166 - protein, 419 aa, Homo sapiens
ELADVGAAASSQGVHDQVLPTPNASSRVIVHVDLDCFYAQVEMISNPELKDKPLGVQQKYLVVTCNYEARKLGVKKLMNVRDAKEKCPQLVLVNGEDLTRYREMSYKVTELLEEFSPVVERLGFDENFVDLTEMVEKRLQQLQSDELSAVTVSGHVYNNQSINLLDVLHIRLLVGSQIAAEMREAMYNQLGLTGCAGVASNKLLAKLVSGVFKPNQQTVLLPESCQHLIHSLNHIKEIPGIGYKTAKCLEALGINSVRDLQTFSPKILEKELGISVAQRIQKLSFGEDNSPVILSGPPQSFSEEDSFKKCSSEVEAKNKIEELLASLLNRVCQDGRKPHTVRLIIRRYSSEKHYGRESRQCPIPSHVIQKLGTGNYDVMTPMVDILMKLFRNMVNVKMPFHLTLLSVCFCNLKALNTAK

SEQ ID NO: 1167 - protein, 899 aa, Homo sapiens
ENYEALVGFDLCNTPLSSVAQKIMSAMHSGDLVDSKTWGKSTETMEVINKSSVKYSVQLEDRKTQSPEKKDLKSLRSQTSRGSAKLSPQSFSVRLTDQLSADQKQKSISSLTLSSCLIPQYNQEASVLQKKGHKRKHFLMENINNENKGSINLKRKHITYNNLSEKTSKQMALEEDTDDAEGYLNSGNSGALKKHFCDIRHLDDWAKSQLIEMLKQAAALVITVMYTDGSTQLGADQTPVSSVRGIVVLVKRQAEGGHGCPDAPACGPVLEGFVSDDPCIYIQIEHSAIWDQEQEAHQQFARNVLFQTMKCKCPVICFNAKDFVRIVLQFFGNDGSWKHVADFIGLDPRIAAWLIDPSDATPSFEDLVEKYCEKSITVKVNSTYGNSSRNIVNQNVRENLKTLYRLTMDLCSKLKDYGLWQLFRTLELPLIPILAVMESHAIQVNKEEMEKTSALLGARLKELEQEAHFVAGERFLITSNNQLREILFGKLKLHLLSQRNSLPRTGLQKYPSTSEAVLNALRDLHPLPKIILEYRQVHKIKSTFVDGLLACMKKGSISSTWNQTGTVTGRLSAKHPNIQGISKHPIQITTPKNFKGKEDKILTISPRAMFVSSKGHTFLAADFSQIELRILTHLSGDPELLKLFQESERDDVFSTLTSQWKDVPVEQVTHADREQTKKVVYAVVYGAGKERLAACLGVPIQEAAQFLESFLQKYKKIKDFARAAIAQCHQTGCVVSIMGRRRPLPRIHAHDQQLRAQAERQAVNFVVQGSAADLCKLAMIHVFTAVAASHTLTARLVAQIHDELLFEVEDPQIPECAALVRRTMESLEQVQALELQLQVPLKVSLSAGRSWGHLVPLQEAWGPPPGPCRTESPSNSLAAPGSPASTQPPPLHFSPSFCL

SEQ ID NO: 1168 - protein, 713 aa, Homo sapiens
MATGQDRVVALVDMDCFFVQVEQRQNPHLRNKPCAVVQYKSWKGGGIIAVSYEARAFGVTRSMWADDAKKLCPDLLLAQVRESRGKANLTKYREASVEVMEIMSRFAVIERASIDEAYVDLTSAVQERLQKLQGQPISADLLPSTYIEGLPQGPTTAEETVQKEGMRKQGLFQWLDSLQIDNLTSPDLQLTVGAVIVEEMRAAIERETGFQCSAGISHNKVLAKLACGLNKPNRQTLVSHGSVPQLFSQMPIRKIRSLGGKLGASVIEILGIEYMGELTQFTESQLQSHFGEKNGSWLYAMCRGIEHDPVKPRQLPKTIGCSKNFPGKTALATREQVQWWLLQLAQELEERLTKDRNDNDRVATQLVVSIRVQGDKRLSSLRRCCALTRYDAHKMSHDAFTVIKNCNTSGIQTEWSPPLTMLFLCATKFSASAPSSSTDITSFLSSDPSSLPKVPVTSSEAKTQGSGPAVTATKKATTSLESFFQKAAERQKVKEASLSSLTAPTQAPMSNSPSKPSLPFQTSQSTGTEPFFKQKSLLLKQKQLNNSSVSSPQQNPWSNCKALPNSLPTEYPGCVPVCEGVSKLEESSKATPAEMDLAHNSQSMHASSASKSVLEVTQKATPNPSLLAAEDQVPCEKCGSLVPVWDMPEHMDYHFALELQKSFLQPHSSNPQVVSAVSHQGKRNPKSPLACTNKRPRPEGMQTLESFFKPLTH

SEQ ID NO: 1169 - protein, 511 aa, Homo sapiens
MATGQDRVVALVDMDCFFVQVEQRQNPHLRNKPCAVVQYKSWKGGGIIAVSYEARAFGVTRSMWADDAKKLCPDLLLAQVRESRGKANLTKYREASVEVMEIMSRFAVIERASIDEAYVDLTSAVQERLQKLQGQPISADLLPSTYIEGLPQGPTTAEETVQKEGMRKQGLFQWLDSLQIDNLTSPDLQLTVGAVIVEEMRAAIERETGFQCSAGISHNKVLAKLACGLNKPNRQTLVSHGSVPQLFSQMPIRKIRSLGGKLGASVIEILGIEYMGELTQFTESQLQSHFGEKNGSWLYAMCRGIEHDPVKPRQLPKTIGCSKNFPGKTALATREQVQWWLLQLAQELEERLTKDRNDNDRVATQLVVSIRVQGDKRLSSLRRCCALTRYDAHKMSHDAFTVIKNCNTSGIQTEWSPPLTMLFLCATKFSASAPSSSTDITSFLSSDPSSLPKVPVTSSEAKTQGSGPAVTATKKATTSLESFFQKAAERQKVKEASLSSLTAPTQAPMSN

SEQ ID NO: 1170 - protein, 870 aa, Homo sapiens
MDSTKEKCDSYKDDLLLRMGLNDNKAGMEGLDKEKINKIIMEATKGSRFYGNELKKEKQVNQRIENMMQQKAQITSQQLRKAQLQVDRFAMELEQSRNLSNTIVHIDMDAFYAAVEMRDNPELKDKPIAVGSMSMLSTSNYHARRFGVRAAMPGFIAKRLCPQLIIVPPNFDKYRAVSKEVKEILADYDPNFMAMSLDEAYLNITKHLEERQNWPEDKRRYFIKMGSSVENDNPGKEVNKLSEHERSISPLLFEESPSDVQPPGDPFQVNFEEQNNPQILQNSVVFGTSAQEVVKEIRFRIEQKTTLTASAGIAPNTMLAKVCSDKNKPNGQYQILPNRQAVMDFIKDLPIRKVSGIGKVTEKMLKALGIITCTELYQQRALLSLLFSETSWHYFLHISLGLGSTHLTRDGERKSMSVERTFSEINKAEEQYSLCQELCSELAQDLQKERLKGRTVTIKLKNVNFEVKTRASTVSSVVSTAEEIFAIAKELLKTEIDADFPHPLRLRLMGVRISSFPNEEDRKHQQRSIIGFLQAGNQALSATECTLEKTDKDKFVKPLEMSHKKSFFDKKRSERKWSHQDTFKCEAVNKQSFQTSQPFQVLKKKMNENLEISENSDDCQILTCPVCFRAQGCISLEALNKHVDECLDGPSISENFKMFSCSHVSATKVNKKENVPASSLCEKQDYEAHPKIKEISSVDCIALVDTIDNSSKAESIDALSNKHSKEECSSLPSKSFNIEHCHQNSSSTVSLENEDVGSFRQEYRQPYLCEVKTGQALVCPVCNVEQKTSDLTLFNVHVDVCLNKSFIQELRKDKFNPVNQPKESSRSTGSSSGVQKAVTRTKRPGLMTKYSTSKKIKPNNPKHTLDIFFK

SEQ ID NO: 1171 - protein, 560 aa, Homo sapiens
MDSTKEKCDSYKDDLLLRMGLNDNKAGMEGLDKEKINKIIMEATKGSRFYGNELKKEKQVNQRIENMMQQKAQITSQQLRKAQLQVDRFAMELEQSRNLSNTIVHIDMDAFYAAVEMRDNPELKDKPIAVGSMSMLSTSNYHARRFGVRAAMPGFIAKRLCPQLIIVPPNFDKYRAVSKEVKEILADYDPNFMAMSLDEAYLNITKHLEERQNWPEDKRRYFIKMGSSVENDNPGKEVNKLSEHERSISPLLFEESPSDVQPPGDPFQVNFEEQNNPQILQNSVVFGTSAQEVVKEIRFRIEQKTTLTASAGIAPNTMLAKVCSDKNKPNGQYQILPNRQAVMDFIKDLPIRKVSGIGKVTEKMLKALGIITCTELYQQRALLSLLFSETSWHYFLHISLGLGSTHLTRDGERKSMSVERTFSEINKAEEQYSLCQELCSELAQDLQKERLKGRTVTIKLKNVNFEVKTRASTVSSVVSTAEEIFAIAKELLKTEIDADFPHPLRLRLMGVRISSFPNEEDRKHQQRSIIGFLQAGNQALSATECTLEKTDKDKFVKPLE

SEQ ID NO: 1172 - protein, 7 aa, Artificial sequence
  Synthetic polypeptide
PKKKRKV

SEQ ID NO: 1173 - protein, 16 aa, Artificial sequence
  Synthetic polypeptide
KRPAATKKAGQAKKKK

SEQ ID NO: 1174 - protein, 9 aa, Artificial sequence
  Synthetic polypeptide
PAAKRVKLD

SEQ ID NO: 1175 - protein, 11 aa, Artificial sequence
  Synthetic polypeptide
RQRRNELKRSP

SEQ ID NO: 1176 - protein, 38 aa, Artificial sequence
  Synthetic polypeptide
NQSSNFGPMKGGNFGGRSSGPYGGGGQYFAKPRNQGGY

SEQ ID NO: 1177 - protein, 42 aa, Artificial sequence
  Synthetic polypeptide
RMRIZFKNKGKDTAELRRRRVEVSVELRKAKKDEQILKRRNV

SEQ ID NO: 1178 - protein, 8 aa, Artificial sequence
  Synthetic polypeptide
VSRKRPRP

SEQ ID NO: 1179 - protein, 8 aa, Artificial sequence
  Synthetic polypeptide
PPKKARED

SEQ ID NO: 1180 - protein, 8 aa, Artificial sequence
  Synthetic polypeptide
PQPKKKPL

SEQ ID NO: 1181 - protein, 12 aa, Artificial sequence
  Synthetic polypeptide
SALIKKKKKMAP

SEQ ID NO: 1182 - protein, 5 aa, Artificial sequence
  Synthetic polypeptide
DRLRR

SEQ ID NO: 1183 - protein, 7 aa, Artificial sequence
  Synthetic polypeptide
PKQKKRK

SEQ ID NO: 1184 - protein, 10 aa, Artificial sequence
  Synthetic polypeptide
RKLKKKIKKL

SEQ ID NO: 1185 - protein, 10 aa, Artificial sequence
  Synthetic polypeptide
REKKKFLKRR

SEQ ID NO: 1186 - protein, 20 aa, Artificial sequence
  Synthetic polypeptide
KRKGDEVDGVDEVAKKKSKK

SEQ ID NO: 1187 - protein, 17 aa, Artificial sequence
  Synthetic polypeptide
RKCLQAGMNLEARKTKK

SEQ ID NO: 1188 - protein, 30 aa, Artificial sequence
  Synthetic polypeptide
MDSLLMNRRKFLYQFKNVRWAKGRRETYLC

SEQ ID NO: 1189 - protein, 11 aa, Artificial sequence
  Synthetic polypeptide
YGRKKRRQRRR

SEQ ID NO: 1190 - protein, 12 aa, Artificial sequence
  Synthetic polypeptide
RRQRRTSKLMKR

SEQ ID NO: 1191 - protein, 27 aa, Artificial sequence
  Synthetic polypeptide
GWTLNSAGYLLGKINLKALAALAKKIL

SEQ ID NO: 1192 - protein, 33 aa, Artificial sequence
  Synthetic polypeptide
KALAWEAKLAKALAKALAKHLAKALAKALKCEA

SEQ ID NO: 1193 - protein, 16 aa, Artificial sequence
  Synthetic polypeptide
RQIKIWFQNRRMKWKK

SEQ ID NO: 1194 - protein, 9 aa, Artificial sequence
  Synthetic polypeptide
RKKRRQRRR

SEQ ID NO: 1195 - protein, 8 aa, Artificial sequence
  Synthetic polypeptide
RKKRRQRR

SEQ ID NO: 1196 - protein, 11 aa, Artificial sequence
  Synthetic polypeptide
YARAAARQARA

SEQ ID NO: 1197 - protein, 11 aa, Artificial sequence
  Synthetic polypeptide
THRLPRRRRRR

SEQ ID NO: 1198 - protein, 11 aa, Artificial sequence
  Synthetic polypeptide
GGRRARRRRRR

SEQ ID NO: 1199 - protein, 75 aa, Artificial sequence
  Synthetic polypeptide
TETFGSWYQPKGGTEMFCHPRTGKPLPKYPRIKTPKVGGIFKKPKNKAQREGREPCELDTREYVAGAPYTPVEHV

SEQ ID NO: 1200 - protein, 160 aa, Staphylococcus aureus
MGSHMTNDIYFMTLAIEEAKKAAQLGEVPIGAIITKDDEVIARAHNLRETLQQPTAHAEHIAIERAAKVLGSWRLEGCTLYVTLEPCVMCAGTIVMSRIPRVVYGADDPKGGCSGSLMNLLQQSNFNHRAIVDKGVLKEACSTLLTTFFKNLRANKKSTN

SEQ ID NO: 1201 - protein, 161 aa, Bacillus subtilis
MTQDELYMKEAIKEAKKAEEKGEVPIGAVLVINGEIIARAHNLRETEQRSIAHAEMLVIDEACKALGTWRLEGATLYVTLEPCPMCAGAVVLSRVEKVVFGAFDPKGGCSGTLMNLLQEERFNHQAEVVSGVLEEECGGMLSAFFRELRKKKKAARKNLSE

SEQ ID NO: 1202 - protein, 183 aa, Salmonella typhimurium
MPPAFITGVTSLSDVELDHEYWMRHALTLAKRAWDEREVPVGAVLVHNHRVIGEGWNRPIGRHDPTAHAEIMALRQGGLVLQNYRLLDTTLYVTLEPCVMCAGAMVHSRIGRVVFGARDAKTGAAGSLIDVLHHPGMNHRVEIIEGVLRDECATLLSDFFRMRRQEIKALKKADRAEGAGPAV

SEQ ID NO: 1203 - protein, 164 aa, Shewanella putrefaciens
MDEYWMQVAMQMAEKAEAAGEVPVGAVLVKDGQQIATGYNLSISQHDPTAHAEILCLRSAGKKLENYRLLDATLYITLEPCAMCAGAMVHSRIARVVYGARDEKTGAAGTVVNLLQHPAFNHQVEVTSGVLAEACSAQLSRFFKRRRDEKKALKLAQRAQQGIE

SEQ ID NO: 1204 - protein, 173 aa, Haemophilus influenzae
MDAAKVRSEFDEKMMRYALELADKAEALGEIPVGAVLVDDARNIIGEGWNLSIVQSDPTAHAEIIALRNGAKNIQNYRLLNSTLYVTLEPCTMCAGAILHSRIKRLVFGASDYKTGAIGSRFHFFDDYKMNHTLEITSGVLAEECSQKLSTFFQKRREEKKIEKALLKSLSDK

SEQ ID NO: 1205 - protein, 161 aa, Caulobacter crescentus
MRTDESEDQDHRMMRLALDAARAAAEAGETPVGAVILDPSTGEVIATAGNGPIAAHDPTAHAEIAAMRAAAAKLGNYRLTDLTLVVTLEPCAMCAGAISHARIGRVVFGADDPKGGAVVHGPKFFAQPTCHWRPEVTGGVLADESADLLRGFFRARRKAKI

SEQ ID NO: 1206 - protein, 179 aa, Geobacter sulfurreducens
MSSLKKTPIRDDAYWMGKAIREAAKAAARDEVPIGAVIVRDGAVIGRGHNLREGSNDPSAHAEMIAIRQAARRSANWRLTGATLYVTLEPCLMCMGAIILARLERVVFGCYDPKGGAAGSLYDLSADPRLNHQVRLSPGVCQEECGTMLSDFFRDLRRRKKAKATPALFIDERKVPPEP

SEQ ID NO: 1207 - protein, 198 aa, Homo sapiens [sequence omitted]

SEQ ID NO: 1208 - protein, 188 aa, Homo sapiens
MDSLLMNRRKFLYQFKNVRWAKGRRETYLCYVVKRRDSATSFSLDFGYLRNKNGCHVELLFLRYISDWDLDPGRCYRVTWFTSWSPCYDCARHVADFLRGNPNLSLRIFTARLYFCEDRKAEPEGLRRLHRAGVQIAIMTFKENHERTFKAWEGLHENSVRLSRQLRRILLPLYEVDDLRDAFRTLGL

SEQ ID NO: 1209 - protein, 198 aa, Homo sapiens [sequence omitted]

SEQ ID NO: 1210 - protein, 1367 aa, Artificial sequence
  Synthetic polypeptide
DKKYSIGLAIGTNSVGWAVITDEYKVPSKKFKVLGNTDRHSIKKNLIGALLFDSGETAEATRLKRTARRRYTRRKNRICYLQEIFSNEMAKVDDSFFHRLEESFLVEEDKKHERHPIFGNIVDEVAYHEKYPTIYHLRKKLVDSTDKADLRLIYLALAHMIKFRGHFLIEGDLNPDNSDVDKLFIQLVQTYNQLFEENPINASGVDAKAILSARLSKSRRLENLIAQLPGEKKNGLFGNLIALSLGLTPNFKSNFDLAEDAKLQLSKDTYDDDLDNLLAQIGDQYADLFLAAKNLSDAILLSDILRVNTEITKAPLSASMIKRYDEHHQDLTLLKALVRQQLPEKYKEIFFDQSKNGYAGYIDGGASQEEFYKFIKPILEKMDGTEELLVKLNREDLLRKQRTFDNGSIPHQIHLGELHAILRRQEDFYPFLKDNREKIEKILTFRIPYYVGPLARGNSRFAWMTRKSEETITPWNFEEVVDKGASAQSFIERMTAFDKNLPNEKVLPKHSLLYEYFTVYNELTKVKYVTEGMRKPAFLSGEQKKAIVDLLFKTNRKVTVKQLKEDYFKKIECFDSVEISGVEDRFNASLGTYHDLLKIIKDKDFLDNEENEDILEDIVLTLTLFEDREMIEERLKTYAHLFDDKVMKQLKRRRYTGWGALSRKLINGIRDKQSGKTILDFLKSDGFANRNFMALIHDDSLTFKEDIQKAQVSGQGDSLHEHIANLAGSPAIKKGILQTVKVVDELVKVMGRHKPENIVIEMARENQTTQKGQKNSRERMKRIEEGIKELGSQILKEHPVENTQLQNEKLYLYYLQNGRDMYVDQELDINRLSDYDVDHIVPQSFLKDDSIDNKVLTRSDKNRGKSDNVPSEEVVKKMKNYWRQLLNAKLITQRKFDNLTKAERGGLSELDKAGFIKRQLVETRAITKHVAQILDSRMNTKYDENDKLIREVKVITLKSKLVSDFRKDFQFYKVREINNYHHAHDAYLNAVVGTALIKKYPKLESEFVYGDYKVYDVRKMIAKSEQEIGKATAKYFFYSNIMNFFKTEITLANGEIRKRPLIETNGETGEIVWDKGRDFATVRKVLSMPQVNIVKKTEVQTGGFSKESILPKRNSDKLIARKKDWDPKKYGGFDSPTVAYSVLVVAKVEKGKSKKLKSVKELLGITIMERSSFEKNPIDFLEAKGYKEVKKDLIIKLPKYSLFELENGRKRMLASAGELQKGNELALPSKYVNFLYLASHYEKLKGSPEDNEQKQLFVEQHKHYLDEIIEQISEFSKRVILADANLDKVLSAYNKHRDKPIREQAENIIHLFTLTNLGAPAAFKYFDTTIDRKRYTSTKEVLDATLIHQSITGLYETRIDLSQLGGD

SEQ ID NO: 1211 - protein, 1367 aa, Artificial sequence; identical to SEQ ID NO: 1143
  Synthetic polypeptide

SEQ ID NO: 1212 - protein, 1367 aa, Artificial sequence; identical to SEQ ID NO: 1142
  Synthetic polypeptide

SEQ ID NO: 1213 - protein, 83 aa, Artificial sequence
  Synthetic polypeptide
TNLSDIIEKETGKQLVIQESILMLPEEVEEVIGNKPESDILVHTAYDESTDENVMLLTSDAPEYKPWALVIQDSNGENKIKML

SEQ ID NO: 1214 - protein, 196 aa, Artificial Sequence
  Synthetic sequence
QLVKSELEEKKSELRHKLKYVPHEYIELIEIARNSTQDRILEMKVMEFFMKVYGYRGKHLGGSRKPDGAIYTVGSPIDYGVIVDTKAYSGGYNLPIGQADEMQRYVEENQTRNKHINPNEWWKVYPSSVTEFKFLFVSGHFKGNYKAQLTRLNHITNCNGAVLSVEELLIGGEMIKAGTLTLEEVRRKFNNGEINF

SEQ ID NO: 1215 - protein, 18 aa, Artificial Sequence
  Synthetic sequence
WPTLVTTLTHGVQCFSRY

SEQ ID NO: 1216 - DNA, 54 bp, Artificial Sequence
  Synthetic sequence
tggcccaccctcgtgaccaccctgacccatggcgtgcagtgcttcagccgctac

SEQ ID NO: 1217 - protein, 18 aa, Artificial Sequence
  Synthetic sequence
WPTLVTTLTYGVQCFSRY

SEQ ID NO: 1218 - DNA, 54 bp, Artificial Sequence
  Synthetic sequence
tggcccaccctcgtgaccaccctgacctatggcgtgcagtgcttcagccgctac

SEQ ID NO: 1219 - protein, 1368 aa, Streptococcus pyogenes [sequence omitted]

SEQ ID NO: 1220 - protein, 1368 aa, Artificial sequence
  Synthetic sequence
MDKKYSIGLAIGTNSVGWAVITDEYKVPSKKFKVLGNTDRHSIKKNLIGALLFDSGETAEATRLKRTARRRYTRRKNRICYLQEIFSNEMAKVDDSFFHRLEESFLVEEDKKHERHPIFGNIVDEVAYHEKYPTIYHLRKKLVDSTDKADLRLIYLALAHMIKFRGHFLIEGDLNPDNSDVDKLFIQLVQTYNQLFEENPINASGVDAKAILSARLSKSRRLENLIAQLPGEKKNGLFGNLIALSLGLTPNFKSNFDLAEDAKLQLSKDTYDDDLDNLLAQIGDQYADLFLAAKNLSDAILLSDILRVNTEITKAPLSASMIKRYDEHHQDLTLLKALVRQQLPEKYKEIFFDQSKNGYAGYIDGGASQEEFYKFIKPILEKMDGTEELLVKLNREDLLRKQRTFDNGSIPHQIHLGELHAILRRQEDFYPFLKDNREKIEKILTFRIPYYVGPLARGNSRFAWMTRKSEETITPWNFEEVVDKGASAQSFIERMTNFDKNLPNEKVLPKHSLLYEYFTVYNELTKVKYVTEGMRKPAFLSGEQKKAIVDLLFKTNRKVTVKQLKEDYFKKIECFDSVEISGVEDRFNASLGTYHDLLKIIKDKDFLDNEENEDILEDIVLTLTLFEDREMIEERLKTYAHLFDDKVMKQLKRRRYTGWGRLSRKLINGIRDKQSGKTILDFLKSDGFANRNFMQLIHDDSLTFKEDIQKAQVSGQGDSLHEHIANLAGSPAIKKGILQTVKVVDELVKVMGRHKPENIVIEMARENQTTQKGQKNSRERMKRIEEGIKELGSQILKEHPVENTQLQNEKLYLYYLQNGRDMYVDQELDINRLSDYDVDHIVPQSFLKDDSIDNKVLTRSDKNRGKSDNVPSEEVVKKMKNYWRQLLNAKLITQRKFDNLTKAERGGLSELDKAGFIKRQLVETRQITKHVAQILDSRMNTKYDENDKLIREVKVITLKSKLVSDFRKDFQFYKVREINNYHHAHDAYLNAVVGTALIKKYPKLESEFVYGDYKVYDVRKMIAKSEQEIGKATAKYFFYSNIMNFFKTEITLANGEIRKRPLIETNGETGEIVWDKGRDFATVRKVLSMPQVNIVKKTEVQTGGFSKESILPKRNSDKLIARKKDWDPKKYGGFDSPTVAYSVLVVAKVEKGKSKKLKSVKELLGITIMERSSFEKNPIDFLEAKGYKEVKKDLIIKLPKYSLFELENGRKRMLASAGELQKGNELALPSKYVNFLYLASHYEKLKGSPEDNEQKQLFVEQHKHYLDEIIEQISEFSKRVILADANLDKVLSAYNKHRDKPIREQAENIIHLFTLTNLGAPAAFKYFDTTIDRKRYTSTKEVLDATLIHQSITGLYETRIDLSQLGGD

SEQ ID NO: 1221 - protein, 1368 aa, Artificial sequence
  Synthetic sequence
MDKKYSIGLDIGTNSVGWAVITDEYKVPSKKFKVLGNTDRHSIKKNLIGALLFDSGETAEATRLKRTARRRYTRRKNRICYLQEIFSNEMAKVDDSFFHRLEESFLVEEDKKHERHPIFGNIVDEVAYHEKYPTIYHLRKKLVDSTDKADLRLIYLALAHMIKFRGHFLIEGDLNPDNSDVDKLFIQLVQTYNQLFEENPINASGVDAKAILSARLSKSRRLENLIAQLPGEKKNGLFGNLIALSLGLTPNFKSNFDLAEDAKLQLSKDTYDDDLDNLLAQIGDQYADLFLAAKNLSDAILLSDILRVNTEITKAPLSASMIKRYDEHHQDLTLLKALVRQQLPEKYKEIFFDQSKNGYAGYIDGGASQEEFYKFIKPILEKMDGTEELLVKLNREDLLRKQRTFDNGSIPHQIHLGELHAILRRQEDFYPFLKDNREKIEKILTFRIPYYVGPLARGNSRFAWMTRKSEETITPWNFEEVVDKGASAQSFIERMTNFDKNLPNEKVLPKHSLLYEYFTVYNELTKVKYVTEGMRKPAFLSGEQKKAIVDLLFKTNRKVTVKQLKEDYFKKIECFDSVEISGVEDRFNASLGTYHDLLKIIKDKDFLDNEENEDILEDIVLTLTLFEDREMIEERLKTYAHLFDDKVMKQLKRRRYTGWGRLSRKLINGIRDKQSGKTILDFLKSDGFANRNFMQLIHDDSLTFKEDIQKAQVSGQGDSLHEHIANLAGSPAIKKGILQTVKVVDELVKVMGRHKPENIVIEMARENQTTQKGQKNSRERMKRIEEGIKELGSQILKEHPVENTQLQNEKLYLYYLQNGRDMYVDQELDINRLSDYDVDAIVPQSFLKDDSIDNKVLTRSDKNRGKSDNVPSEEVVKKMKNYWRQLLNAKLITQRKFDNLTKAERGGLSELDKAGFIKRQLVETRQITKHVAQILDSRMNTKYDENDKLIREVKVITLKSKLVSDFRKDFQFYKVREINNYHHAHDAYLNAVVGTALIKKYPKLESEFVYGDYKVYDVRKMIAKSEQEIGKATAKYFFYSNIMNFFKTEITLANGEIRKRPLIETNGETGEIVWDKGRDFATVRKVLSMPQVNIVKKTEVQTGGFSKESILPKRNSDKLIARKKDWDPKKYGGFDSPTVAYSVLVVAKVEKGKSKKLKSVKELLGITIMERSSFEKNPIDFLEAKGYKEVKKDLIIKLPKYSLFELENGRKRMLASAGELQKGNELALPSKYVNFLYLASHYEKLKGSPEDNEQKQLFVEQHKHYLDEIIEQISEFSKRVILADANLDKVLSAYNKHRDKPIREQAENIIHLFTLTNLGAPAAFKYFDTTIDRKRYTSTKEVLDATLIHQSITGLYETRIDLSQLGGD

SEQ ID NO: 1222 - protein, 1368 aa, Artificial sequence
  Synthetic sequence
MDKKYSIGLAIGTNSVGWAVITDEYKVPSKKFKVLGNTDRHSIKKNLIGALLFDSGETAEATRLKRTARRRYTRRKNRICYLQEIFSNEMAKVDDSFFHRLEESFLVEEDKKHERHPIFGNIVDEVAYHEKYPTIYHLRKKLVDSTDKADLRLIYLALAHMIKFRGHFLIEGDLNPDNSDVDKLFIQLVQTYNQLFEENPINASGVDAKAILSARLSKSRRLENLIAQLPGEKKNGLFGNLIALSLGLTPNFKSNFDLAEDAKLQLSKDTYDDDLDNLLAQIGDQYADLFLAAKNLSDAILLSDILRVNTEITKAPLSASMIKRYDEHHQDLTLLKALVRQQLPEKYKEIFFDQSKNGYAGYIDGGASQEEFYKFIKPILEKMDGTEELLVKLNREDLLRKQRTFDNGSIPHQIHLGELHAILRRQEDFYPFLKDNREKIEKILTFRIPYYVGPLARGNSRFAWMTRKSEETITPWNFEEVVDKGASAQSFIERMTNFDKNLPNEKVLPKHSLLYEYFTVYNELTKVKYVTEGMRKPAFLSGEQKKAIVDLLFKTNRKVTVKQLKEDYFKKIECFDSVEISGVEDRFNASLGTYHDLLKIIKDKDFLDNEENEDILEDIVLTLTLFEDREMIEERLKTYAHLFDDKVMKQLKRRRYTGWGRLSRKLINGIRDKQSGKTILDFLKSDGFANRNFMQLIHDDSLTFKEDIQKAQVSGQGDSLHEHIANLAGSPAIKKGILQTVKVVDELVKVMGRHKPENIVIEMARENQTTQKGQKNSRERMKRIEEGIKELGSQILKEHPVENTQLQNEKLYLYYLQNGRDMYVDQELDINRLSDYDVDAIVPQSFLKDDSIDNKVLTRSDKNRGKSDNVPSEEVVKKMKNYWRQLLNAKLITQRKFDNLTKAERGGLSELDKAGFIKRQLVETRQITKHVAQILDSRMNTKYDENDKLIREVKVITLKSKLVSDFRKDFQFYKVREINNYHHAHDAYLNAVVGTALIKKYPKLESEFVYGDYKVYDVRKMIAKSEQEIGKATAKYFFYSNIMNFFKTEITLANGEIRKRPLIETNGETGEIVWDKGRDFATVRKVLSMPQVNIVKKTEVQTGGFSKESILPKRNSDKLIARKKDWDPKKYGGFDSPTVAYSVLVVAKVEKGKSKKLKSVKELLGITIMERSSFEKNPIDFLEAKGYKEVKKDLIIKLPKYSLFELENGRKRMLASAGELQKGNELALPSKYVNFLYLASHYEKLKGSPEDNEQKQLFVEQHKHYLDEIIEQISEFSKRVILADANLDKVLSAYNKHRDKPIREQAENIIHLFTLTNLGAPAAFKYFDTTIDRKRYTSTKEVLDATLIHQSITGLYETRIDLSQLGGD

SEQ ID NO: 1223 - protein, 1368 aa, Artificial sequence
  Synthetic sequence
MDKKYSIGLAIGTNSVGWAVITDEYKVPSKKFKVLGNTDRHSIKKNLIGALLFDSGETAEATRLKRTARRRYTRRKNRICYLQEIFSNEMAKVDDSFFHRLEESFLVEEDKKHERHPIFGNIVDEVAYHEKYPTIYHLRKKLVDSTDKADLRLIYLALAHMIKFRGHFLIEGDLNPDNSDVDKLFIQLVQTYNQLFEENPINASGVDAKAILSARLSKSRRLENLIAQLPGEKKNGLFGNLIALSLGLTPNFKSNFDLAEDAKLQLSKDTYDDDLDNLLAQIGDQYADLFLAAKNLSDAILLSDILRVNTEITKAPLSASMIKRYDEHHQDLTLLKALVRQQLPEKYKEIFFDQSKNGYAGYIDGGASQEEFYKFIKPILEKMDGTEELLVKLNREDLLRKQRTFDNGSIPHQIHLGELHAILRRQEDFYPFLKDNREKIEKILTFRIPYYVGPLARGNSRFAWMTRKSEETITPWNFEEVVDKGASAQSFIERMTNFDKNLPNEKVLPKHSLLYEYFTVYNELTKVKYVTEGMRKPAFLSGEQKKAIVDLLFKTNRKVTVKQLKEDYFKKIECFDSVEISGVEDRFNASLGTYHDLLKIIKDKDFLDNEENEDILEDIVLTLTLFEDREMIEERLKTYAHLFDDKVMKQLKRRRYTGWGRLSRKLINGIRDKQSGKTILDFLKSDGFANRNFMQLIHDDSLTFKEDIQKAQVSGQGDSLHEHIANLAGSPAIKKGILQTVKVVDELVKVMGRHKPENIVIEMARENQTTQKGQKNSRERMKRIEEGIKELGSQILKEHPVENTQLQNEKLYLYYLQNGRDMYVDQELDINRLSDYDVDHIVPQSFLADDSIDNKVLTRSDKNRGKSDNVPSEEVVKKMKNYWRQLLNAKLITQRKFDNLTKAERGGLSELDKAGFIKRQLVETRQITKHVAQILDSRMNTKYDENDKLIREVKVITLKSKLVSDFRKDFQFYKVREINNYHHAHDAYLNAVVGTALIKKYPALESEFVYGDYKVYDVRKMIAKSEQEIGKATAKYFFYSNIMNFFKTEITLANGEIRKAPLIETNGETGEIVWDKGRDFATVRKVLSMPQVNIVKKTEVQTGGFSKESILPKRNSDKLIARKKDWDPKKYGGFDSPTVAYSVLVVAKVEKGKSKKLKSVKELLGITIMERSSFEKNPIDFLEAKGYKEVKKDLIIKLPKYSLFELENGRKRMLASAGELQKGNELALPSKYVNFLYLASHYEKLKGSPEDNEQKQLFVEQHKHYLDEIIEQISEFSKRVILADANLDKVLSAYNKHRDKPIREQAENIIHLFTLTNLGAPAAFKYFDTTIDRKRYTSTKEVLDATLIHQSITGLYETRIDLSQLGGD

SEQ ID NO: 1224 - protein, 1053 aa, Staphylococcus aureus; identical to SEQ ID NO: 249

SEQ ID NO: 1225 - protein, 1300 aa, Francisella tularensis; identical to SEQ ID NO: 818

SEQ ID NO: 1226 - protein, 1306 aa, Acidaminococcus
TQFEGFTNLYQVSKTLRFELIPQGKTLKHIQEQGFIEEDKARNDHYKELKPIIDRIYKTYADQCLQLVQLDWENLSAAIDSYRKEKTEETRNALIEEQATYRNAIHDYFIGRTDNLTDAINKRHAEIYKGLFKAELFNGKVLKQLGTVTTTEHENALLRSFDKFTTYFSGFYENRKNVFSAEDISTAIPHRIVQDNFPKFKENCHIFTRLITAVPSLREHFENVKKAIGIFVSTSIEEVFSFPFYNQLLTQTQIDLYNQLLGGISREAGTEKIKGLNEVLNLAIQKNDETAHIIASLPHRFIPLFKQILSDRNTLSFILEEFKSDEEVIQSFCKYKTLLRNENVLETAEALFNELNSIDLTHIFISHKKLETISSALCDHWDTLRNALYERRISELTGKITKSAKEKVQRSLKHEDINLQEIISAAGKELSEAFKQKTSEILSHAHAALDQPLPTTLKKQEEKEILKSQLDSLLGLYHLLDWFAVDESNEVDPEFSARLTGIKLEMEPSLSFYNKARNYATKKPYSVEKFKLNFQMPTLASGWDVNKEKNNGAILFVKNGLYYLGIMPKQKGRYKALSFEPTEKTSEGFDKMYYDYFPDAAKMIPKCSTQLKAVTAHFQTHTTPILLSNNFIEPLEITKEIYDLNNPEKEPKKFQTAYAKKTGDQKGYREALCKWIDFTRDFLSKYTKTTSIDLSSLRPSSQYKDLGEYYAELNPLLYHISFQRIAEKEIMDAVETGKLYLFQIYNKDFAKGHHGKPNLHTLYWTGLFSPENLAKTSIKLNGQAELFYRPKSRMKRMAHRLGEKMLNKKLKDQKTPIPDTLYQELYDYVNHRLSHDLSDEARALLPNVITKEVSHEIIKDRRFTSDKFFFHVPITLNYQAANSPSKFNQRVNAYLKEHPETPIIGIDRGERNLIYITVIDSTGKILEQRSLNTIQQFDYQKKLDNREKERVAARQAWSVVGTIKDLKQGYLSQVIHEIVDLMIHYQAVVVLENLNFGFKSKRTGIAEKAVYQQFEKMLIDKLNCLVLKDYPAEKVGGVLNPYQLTDQFTSFAKMGTQSGFLFYVPAPYTSKIDPLTGFVDPFVWKTIKNHESRKHFLEGFDFLHYDVKTGDFILHFKMNRNLSFQRGLPGFMPAWDIVFEKNETQFDAKGTPFIAGKRIVPVIENHRFTGRYRDLYPANELIALLEEKGIVFRDGSNILPKLLENDDSHAIDTMVALIRSVLQMRNSNAATGEDYINSPVRDLNGVCFDSRFQNPEWPMDADANGAYHIALKGQLLLNHLKESKDLKLQNGISNQDWLAYIQELRN

SEQ ID NO: 1227 - protein, 1306 aa, Artificial sequence
  Synthetic sequence
TQFEGFTNLYQVSKTLRFELIPQGKTLKHIQEQGFIEEDKARNDHYKELKPIIDRIYKTYADQCLQLVQLDWENLSAAIDSYRKEKTEETRNALIEEQATYRNAIHDYFIGRTDNLTDAINKRHAEIYKGLFKAELFNGKVLKQLGTVTTTEHENALLRSFDKFTTYFSGFYENRKNVFSAEDISTAIPHRIVQDNFPKFKENCHIFTRLITAVPSLREHFENVKKAIGIFVSTSIEEVFSFPFYNQLLTQTQIDLYNQLLGGISREAGTEKIKGLNEVLNLAIQKNDETAHIIASLPHRFIPLFKQILSDRNTLSFILEEFKSDEEVIQSFCKYKTLLRNENVLETAEALFNELNSIDLTHIFISHKKLETISSALCDHWDTLRNALYERRISELTGKITKSAKEKVQRSLKHEDINLQEIISAAGKELSEAFKQKTSEILSHAHAALDQPLPTTLKKQEEKEILKSQLDSLLGLYHLLDWFAVDESNEVDPEFSARLTGIKLEMEPSLSFYNKARNYATKKPYSVEKFKLNFQMPTLASGWDVNKEKNNGAILFVKNGLYYLGIMPKQKGRYKALSFEPTEKTSEGFDKMYYDYFPDAAKMIPKCSTQLKAVTAHFQTHTTPILLSNNFIEPLEITKEIYDLNNPEKEPKKFQTAYAKKTGDQKGYREALCKWIDFTRDFLSKYTKTTSIDLSSLRPSSQYKDLGEYYAELNPLLYHISFQRIAEKEIMDAVETGKLYLFQIYNKDFAKGHHGKPNLHTLYWTGLFSPENLAKTSIKLNGQAELFYRPKSRMKRMAHRLGEKMLNKKLKDQKTPIPDTLYQELYDYVNHRLSHDLSDEARALLPNVITKEVSHEIIKDRRFTSDKFFFHVPITLNYQAANSPSKFNQRVNAYLKEHPETPIIGIDRGERNLIYITVIDSTGKILEQRSLNTIQQFDYQKKLDNREKERVAARQAWSVVGTIKDLKQGYLSQVIHEIVDLMIHYQAVVVLENLNFGFKSKRTGIAEKAVYQQFEKMLIDKLNCLVLKDYPAEKVGGVLNPYQLTDQFTSFAKMGTQSGFLFYVPAPYTSKIDPLTGFVDPFVWKTIKNHESRKHFLEGFDFLHYDVKTGDFILHFKMNRNLSFQRGLPGFMPAWDIVFEKNETQFDAKGTPFIAGKRIVPVIENHRFTGRYRDLYPANELIALLEEKGIVFRDGSNILPKLLENDDSHAIDTMVALIRSVLQMANSNAATGEDYINSPVRDLNGVCFDSRFQNPEWPMDADANGAYHIALKGQLLLNHLKESKDLKLQNGISNQDWLAYIQELRN

SEQ ID NO: 1228 - protein, 928 aa, Artificial sequence
  Synthetic sequence
MVQIPQNPLILVDGSSYLYRAYHAFPPLTNSAGEPTGAMYGVLNMLRSLIMQYKPTHAAVVFDAKGKTFRDELFEHYKSHRPPMPDDLRAQIEPLHAMVKAMGLPLLAVSGVEADDVIGTLAREAEKAGRPVLISTGDKDMAQLVTPNITLINTMTNTILGPEEVVNKYGVPPELIIDFLALMGDSSDNIPGVPGVGEKTAQALLQGLGGLDTLYAEPEKIAGLSFRGAKTMAAKLEQNKEVAYLSYQLATIKTDVELELTCEQLEVQQPAAEELLGLFKKYEFKRWTADVEAGKWLQAKGAKPAAKPQETSVADEAPEVTATVISYDNYVTILDEETLKAWIAKLEKAPVFAFDTETDSLDNISANLVGLSFAIEPGVAAYIPVAHDYLDAPDQISRERALELLKPLLEDEKALKVGQNLKYARGILANYGIELRGIAFDTMLESYILNSVAGRHDMDSLAERWLKHKTITFEEIAGKGKNQLTFNQIALEEAGRYAAEDADVTLQLHLKMWPDLQKHKGPLNVFENIEMPLVPVLSRIERNGVKIDPKVLHNHSEELTLRLAELEKKAHEIAGEEFNLSSTKQLQTILFEKQGIKPLKKTPGGAPSTSEEVLEELALDYPLPKVILEYRGLAKLKSTYTDKLPLMINPKTGRVHTSYHQAVTATGRLSSTDPNLQNIPVRNEEGRRIRQAFIAPEDYVIVSADYSQIELRIMAHLSRDKGLLTAFAEGKDIHRATAAEVFGLPLETVTSEQRRSAKAINFGLIYGMSAFGLARQLNIPRKEAQKYMDLYFERYPGVLEYMERTRAQAKEQGYVETLDGRRLYLPDIKSSNGARRAAAERAAINAPMQGTAADIIKRAMIAVDAWLQAEQPRVRMIMQVHDELVFEVHKDDVDAVAKQIHQLMENCTRLDVPLLVEVGSGENWDQAH

SEQ ID NO: 1229 - protein, 928 aa, Artificial sequence
  Synthetic sequence
MVQIPQNPLILVDGSSYLYRAYHAFPPLTNSAGEPTGAMYGVLNMLRSLIMQYKPTHAAVVFDAKGKTFRDELFEHYKSHRPPMPDDLRAQIEPLHAMVKAMGLPLLAVSGVEADDVIGTLAREAEKAGRPVLISTGDKDMAQLVTPNITLINTMTNTILGPEEVVNKYGVPPELIIDFLALMGDSSDNIPGVPGVGEKTAQALLQGLGGLDTLYAEPEKIAGLSFRGAKTMAAKLEQNKEVAYLSYQLATIKTDVELELTCEQLEVQQPAAEELLGLFKKYEFKRWTADVEAGKWLQAKGAKPAAKPQETSVADEAPEVTATVISYDNYVTILDEETLKAWIAKLEKAPVFAFDTETDSLDNISANLVGLSFAIEPGVAAYIPVAHDYLDAPDQISRERALELLKPLLEDEKALKVGQNLKYARGILANYGIELRGIAFDTMLESYILNSVAGRHDMDSLAERWLKHKTITFEEIAGKGKNQLTFNQIALEEAGRYAAEDADVTLQLHLKMWPDLQKHKGPLNVFENIEMPLVPVLSRIERNGVKIDPKVLHNHSEELTLRLAELEKKAHEIAGEEFNLSSTKQLQTILFEKQGIKPLKKTPGGAPSTSEEVLEELALDYPLPKVILEYRGLAKLKSTYTDKLPLMINPKTGRVHTSYHQAVTATGRLSSTDPNLQNIPVRNEEGRRIRQAFIAPEDYVIVSADYSQNELRIMAHLSRDKGLLTAFAEGKDIHRATAAEVFGLPLETVTSEQRRSAKAINFGLIYGMSAFGLARQLNIPRKEAQKYMDLYFERYPGVLEYMERTRAQAKEQGYVETLDGRRLYLPDIKSSNGARRAAAERAAINAPMQGTAADIIKRAMIAVDAWLQAEQPRVRMIMQVHDELVFEVHKDDVDAVAKQIHQLMENCTRLDVPLLVEVGSGENWDQAH

SEQ ID NO: 1230 - protein, 928 aa, Artificial sequence
  Synthetic sequence
MVQIPQNPLILVDGSSYLYRAYHAFPPLTNSAGEPTGAMYGVLNMLRSLIMQYKPTHAAVVFDAKGKTFRDELFEHYKSHRPPMPDDLRAQIEPLHAMVKAMGLPLLAVSGVEADDVIGTLAREAEKAGRPVLISTGDKDMAQLVTPNITLINTMTNTILGPEEVVNKYGVPPELIIDFLALMGDSSDNIPGVPGVGEKTAQALLQGLGGLDTLYAEPEKIAGLSFRGAKTMAAKLEQNKEVAYLSYQLATIKTDVELELTCEQLEVQQPAAEELLGLFKKYEFKRWTADVEAGKWLQAKGAKPAAKPQETSVADEAPEVTATVISYDNYVTILDEETLKAWIAKLEKAPVFAFDTETDSLDNISANLVGLSFAIEPGVAAYIPVAHDYLDAPDQISRERALELLKPLLEDEKALKVGQNLKYARGILANYGIELRGIAFDTMLESYILNSVAGRHDMDSLAERWLKHKTITFEEIAGKGKNQLTFNQIALEEAGRYAAEDADVTLQLHLKMWPDLQKHKGPLNVFENIEMPLVPVLSRIERNGVKIDPKVLHNHSEELTLRLAELEKKAHEIAGEEFNLSSTKQLQTILFEKQGIKPLKKTPGGAPSTSEEVLEELALDYPLPKVILEYRGLAKLKSTYTDKLPLMINPKTGRVHTSYHQAVTATGRLSSTDPNLQNIPVRNEEGRRIRQAFIAPEDYVIVSADYSQNELRIMAHLSRDKGLLTAFAEGKDIHRATAAEVFGLPLETVTSEQRRSAKRINFGLIYGMSAFGLARQLNIPRKEAQKYMDLYFERYPGVLEYMERTRAQAKEQGYVETLDGRRLYLPDIKSSNGARRAAAERAAINAPMQGTAADIIKRAMIAVDAWLQAEQPRVRMIMQVHDELVFEVHKDDVDAVAKQIHQLMENCTRLDVPLLVEVGSGENWDQAH

SEQ ID NO: 1231 - protein, 996 aa, Artificial sequence; identical to SEQ ID NO: 1148
  Synthetic sequence

SEQ ID NO: 1232 - protein, 575 aa, Artificial sequence [sequence omitted]

SEQ ID NO: 1233 - protein, 829 aa, Artificial sequence
  Synthetic sequence
MYSICVTRSCPVVCSKKHITIGTPENPFDPNDYDFVILVGAEPFLYFAGKKGIGDYTGKRVEYNGYANWIASISPAQLHFKPEMKPVFDATVENIHDIINGREKIAKAGDYRPITDPDEAEEYIKMVYNMVIGPVAFDSETSALYCRDGYLLGVSISHQEYQGVYIDSDCLTEVAVYYLQKILDSENHTIVFHNLKFDMHFYKYHLGLTFDKAHKERRLHDTMLQHYVLDERRGTHGLKSLAMKYTDMGDYDFELDKFKDDYCKAHKIKKEDFTYDLIPFDIMWPYAAKDTDATIRLHNFFLPKIEKNEKLCSLYYDVLMPGCVFLQRVEDRGVPISIDRLKEAQYQLTHNLNKAREKLYTYPEVKQLEQDQNEAFNPNSVKQLRVLLFDYVGLTPTGKLTDTGADSTDAEALNELATQHPIAKTLLEIRKLTKLISTYVEKILLSIDADGCIRTGFHEHMTTSGRLSSSGKLNLQQLPRDESIIKGCVVAPPGYRVIAWDLTTAEVYYAAVLSGDRNMQQVFINMRNEPDKYPDFHSNIAHMVFKLQCEPRDVKKLFPALRQAAKAITFGILYGSGPAKVAHSVNEALLEQAAKTGEPFVECTVADAKEYIETYFGQFPQLKRWIDKCHDQIKNHGFIYSHFGRKRRLHNIHSEDRGVQGEEIRSGFNAIIQSASSDSLLLGAVDADNEIISLGLEQEMKIVMLVHDSVVAIVREDLIDQYNEILIRNIQKDRGISIPGCPIGIDSDSEAGGSRDYSCGKMKKQHPSIACIDDDEYTRYVKGVLLDAEFEYKKLAAMDKEHPDHSKYKDDKFIAVCKDLDNVKRILGA

SEQ ID NO: 1234 - protein, 683 aa, Artificial sequence
  Synthetic sequence
MNERLCYDIETDGLIEEVTKLHCIAIINVDTLEEALYADSLVMMTQGTIKDGLDRLNKASLTLGHNIIKYDHPVINKLTGYELPKDKSFDTLVASRLVFSNIKDIDQGNSGKYTLGKLFGSHSLEAWGIRLGGQQKMEYAPVIDPAQPVYDPTVKPKDAKKDPRWKGSIFTPMMGDYCMQDVRVNVELFRRLERKIHQLGYARSMLLEHEAAWVLAQQERNGFKFDEEKAIKLLGRLAGRREYLYNKLIETFGGWWVSDGVSVPARTINYKDPTKPSRVQGAPFTKVKWVDFNPSSRRHIIKVLTDRGWTPQEFTPSGEAKVDESILKELDFPEARLMAEWFLVQKRLGQLADGNQAWLNTVHPDGFIRGSVNPNGAVTGRATHSFPNVAQVPSCSAEYGAECRELFTVPDGWYLLGSDASGLELRCLANFMARYDDGKYIDVVLNGDIHWSNAQAAGFIPKGTIRDPHNPIHEEARRKAKTFIYAFLYGCGAELTGQQVGWTEEEYLNWKAKGAHKPIINRFKRQGKPWTREKICNILKGEEVQKNFMKGLPALKNLIDECKELHKEQGYIEGIDGRRIYTRSAHASLNTLLQGAGALVCKAWIVEIEKLAIAEGLKHGIDGDFMYCAWVHDEVQIACRTKEIAERIGQLCQVAMTNVEKEFNFVCRLDADFDIGKSWKETH

SEQ ID NO: 1235 - protein, 1001 aa, Artificial sequence
  Synthetic sequence
VQIPQNPLILVDGSSYLYRAYHAFPPLTNSAGEPTGAMYGVLNMLRSLIMQYKPTHAAVVFDAKGKTFRDELFEHYKSHRPPMPDDLRAQIEPLHAMVKAMGLPLLAVSGVEADDVIGTLAREAEKAGRPVLISTGDKDMAQLVTPNITLINTMTNTILGPEEVVNKYGVPPELIIDFLALMGDSSDNIPGVPGVGEKTAQALLQGLGGLDTLYAEPEKIAGLSFRGAKTMAAKLEQNKEVAYLSYQLATIKTDVELELTCEQLEVQQPAAEELLGLFKKYEFKRWTADVEAGKWLQAKGAKPAAKPQETSVADEAPEVTATVIGSIVSDIEANALLESVTKFHCGVIYDYSTAEYVSYRPSDFGAYLDALEAEVARGGLIVFHNGHKYDVPALTKLAKLQLNREFHLPRENCIDTLVLSRLIHSNLKDTDMGLLRSGKLPGMLEEQGEEYVDGMEWWNFNEEMMDYNVQDVVVTKALLEKLLSDKHYFPPEIDFTDVGYTTFWSESLEAVDIEHRAAWLLAKQERNGFPFDTKAIEELYVELAARRSELLRKLTETFGSWYQPKGGTEMFCHPRTGKPLPKYPRIKTPKVGGIFKKPKNKAQREGREPCELDTREYVAGAPYTPVEHVVFNPSSRDHIQKKLQEAGWVPTKYTDKGAPVVDDEVLEGVRVDDPEKQAAIDLIKEYLMIQKRIGQSAEGDKAWLRYVAEDGKIHGSVNPNGAVTGRATHAFPNLAQIPGVRSPYGEQCRAAFGAEHHLDGITGKPWVQAGIDASGNELRCLAHFMARFDNGEYAHEILNGDIHTKNQIAAELPTRDNAKRFIYGFLYGAGDEKIGQIVGAGKERGKELKKKFLENTPAIAALRESIQQTLVESSQWVAGEQQVKWKRRWIKGLDGRKVHVRSPHAALNTLLQSAGALICKLWIIKTEEMLVEKGLKHGWDGDFAYMAWVHDEIQVGCRTEEIAQVVIETAQEAMRWVGDHWNFRCLLDTEGKMGPNWAICH

SEQ ID NO: 1236 - protein, 64 aa, Sulfolobus solfataricus
MATVKFKYKGEEKEVDISKIKKVWRVGKMISFTYDEGGGKTGRGAVSEKDAPKELLQMLEKQKK

SEQ ID NO: 1237 - protein, 740 aa, Artificial sequence; identical to SEQ ID NO: 1164
  Synthetic sequence

SEQ ID NO: 1238 - protein, 713 aa, Artificial sequence; identical to SEQ ID NO: 1168
  Synthetic sequence

SEQ ID NO: 1239 - protein, 870 aa, Artificial sequence; identical to SEQ ID NO: 1170
  Synthetic sequence

SEQ ID NO: 1240 - protein, 2590 aa, Artificial sequence
  Synthetic sequence
MNLLRRSGKRRRSESGSDSFSGSGGDSSASPQFLSGSVLSPPPGLGRCLKAAAAGECKPTVPDYERDKLLLANWGLPKAVLEKYHSFGVKKMFEWQAECLLLGQVLEGKNLVYSAPTSAGKTLVAELLILKRVLEMRKKALFILPFVSVAKEKKYYLQSLFQEVGIKVDGYMGSTSPSRHFSSLDIAVCTIERANGLINRLIEENKMDLLGMVVVDELHMLGDSHRGYLLELLLTKICYITRKSASCQADLASSLSNAVQIVGMSATLPNLELVASWLNAELYHTDFRPVPLLESVKVGNSIYDSSMKLVREFEPMLQVKGDEDHVVSLCYETICDNHSVLLFCPSKKWCEKLADIIAREFYNLHHQAEGLVKPSECPPVILEQKELLEVMDQLRRLPSGLDSVLQKTVPWGVAFHHAGLTFEERDIIEGAFRQGLIRVLAATSTLSSGVNLPARRVIIRTPIFGGRPLDILTYKQMVGRAGRKGVDTVGESILICKNSEKSKGIALLQGSLKPVRSCLQRREGEEVTGSMIRAILEIIVGGVASTSQDMHTYAACTFLAASMKEGKQGIQRNQESVQLGAIEACVMWLLENEFIQSTEASDGTEGKVYHPTHLGSATLSSSLSPADTLDIFADLQRAMKGFVLENDLHILYLVTPMFEDWTTIDWYRFFCLWEKLPTSMKRVAELVGVEEGFLARCVKGKVVARTERQHRQMAIHKRFFTSLVLLDLISEVPLREINQKYGCNRGQIQSLQQSAAVYAGMITVFSNRLGWHNMELLLSQFQKRLTFGIQRELCDLVRVSLLNAQRARVLYASGFHTVADLARANIVEVEVILKNAVPFKSARKAVDEEEEAVEERRNMRTIWVTGRKGLTEREAAALIVEEARMILQQDLVEMGVQWNPCALLHSSTCSLTHSESEVKEHTFISQTKSSYKKLTSKNKSNTIFSDSYIKHSPNIVQDLNKSREHTSSFNCNFQNGNQEHQTCSIFRARKRASLDINKEKPGASQNEGKTSDKKVVQTFSQKTKKAPLNFNSEKMSRSFRSWKRRKHLKRSRDSSPLKDSGACRIHLQGQTLSNPSLCEDPFTLDEKKTEFRNSGPFAKNVSLSGKEKDNKTSFPLQIKQNCSWNITLTNDNFVEHIVTGSQSKNVTCQATSVVSEKGRGVAVEAEKINEVLIQNGSKNQNVYMKHHDIHPINQYLRKQSHEQTSTITKQKNIIERQMPCEAVSSYINRDSNVTINCERIKLNTEENKPSHFQALGDDISRTVIPSEVLPSAGAFSKSEGQHENFLNISRLQEKTGTYTTNKTKNNHVSDLGLVLCDFEDSFYLDTQSEKIIQQMATENAKLGAKDTNLAAGIMQKSLVQQNSMNSFQKECHIPFPAEQHPLGATKIDHLDLKTVGTMKQSSDSHGVDILTPESPIFHSPILLEENGLFLKKNEVSVTDSQLNSFLQGYQTQETVKPVILLIPQKRTPTGVEGECLPVPETSLNMSDSLLFDSFSDDYLVKEQLPDMQMKEPLPSEVTSNHFSDSLCLQEDLIKKSNVNENQDTHQQLTCSNDESIIFSEMDSVQMVEALDNVDIFPVQEKNHTVVSPRALELSDPVLDEHHQGDQDGGDQDERAEKSKLTGTRQNHSFIWSGASFDLSPGLQRILDKVSSPLENEKLKSMTINFSSLNRKNTELNEEQEVISNLETKQVQGISFSSNNEVKSKIEMLENNANHDETSSLLPRKESNIVDDNGLIPPTPIPTSASKLTFPGILETPVNPWKTNNVLQPGESYLFGSPSDIKNHDLSPGSRNGFKDNSPISDTSFSLQLSQDGLQLTPASSSSESLSIIDVASDQNLFQTFIKEWRCKKRFSISLACEKIRSLTSSKTATIGSRFKQASSPQEIPIRDDGFPIKGCDDTLVVGLAVCWGGRDAYYFSLQKEQKHSEISASLVPPSLDPSLTLKDRMWYLQSCLRKESDKECSVVIYDFIQSYKILLLSCGISLEQSYEDPKVACWLLDPDSQEPTLHSIVTSFLPHELPLLEGMETSQGIQSLGLNAGSEHSGRYRASVESILIFNSMNQLNSLLQKENLQDVFRKVEMPSQYCLALLELNGIGFSTAECESQKHIMQAKLDAIETQAYQLAGHSFSFTSSDDIAEVLFLELKLPPNREMKNQGSKKTLGSTRRGIDNGRKLRLGRQFSTSKDVLNKLKALHPLPGLILEWRRITNAITKVVFPLQREKCLNPFLGMERIYPVSQSHTATGRITFTEPNIQNVPRDFEIKMPTLVGESPPSQAVGKGLLPMGRGKYKKGFSVNPRCQAQMEERAADRGMPFSISMRHAFVPFPGGSILAADYSQLELRILAHLSHDRRLIQVLNTGADVFRSIAAEWKMIEPESVGDDLRQQAKQICYGIIYGMGAKSLGEQMGIKENDAACYIDSFKSRYTGINQFMTETVKNCKRDGFVQTILGRRRYLPGIKDNNPYRKAHAERQAINTIVQGSAADIVKIATVNIQKQLETFHSTFKSHGHREGMLQSDQTGLSRKRKLQGMFCPIRGGFFILQLHDELLYEVAEEDVVQVAQIVKNEMESAVKLSVKLKVKVKIGASWGELKDFDV

SEQ ID NO: 1241 - protein, 900 aa, Artificial sequence
  Synthetic sequence
MENYEALVGFDLCNTPLSSVAQKIMSAMHSGDLVDSKTWGKSTETMEVINKSSVKYSVQLEDRKTQSPEKKDLKSLRSQTSRGSAKLSPQSFSVRLTDQLSADQKQKSISSLTLSSCLIPQYNQEASVLQKKGHKRKHFLMENINNENKGSINLKRKHITYNNLSEKTSKQMALEEDTDDAEGYLNSGNSGALKKHFCDIRHLDDWAKSQLIEMLKQAAALVITVMYTDGSTQLGADQTPVSSVRGIVVLVKRQAEGGHGCPDAPACGPVLEGFVSDDPCIYIQIEHSAIWDQEQEAHQQFARNVLFQTMKCKCPVICFNAKDFVRIVLQFFGNDGSWKHVADFIGLDPRIAAWLIDPSDATPSFEDLVEKYCEKSITVKVNSTYGNSSRNIVNQNVRENLKTLYRLTMDLCSKLKDYGLWQLFRTLELPLIPILAVMESHAIQVNKEEMEKTSALLGARLKELEQEAHFVAGERFLITSNNQLREILFGKLKLHLLSQRNSLPRTGLQKYPSTSEAVLNALRDLHPLPKIILEYRQVHKIKSTFVDGLLACMKKGSISSTWNQTGTVTGRLSAKHPNIQGISKHPIQITTPKNFKGKEDKILTISPRAMFVSSKGHTFLAADFSQIELRILTHLSGDPELLKLFQESERDDVFSTLTSQWKDVPVEQVTHADREQTKKVVYAVVYGAGKERLAACLGVPIQEAAQFLESFLQKYKKIKDFARAAIAQCHQTGCVVSIMGRRRPLPRIHAHDQQLRAQAERQAVNFVVQGSAADLCKLAMIHVFTAVAASHTLTARLVAQIHDELLFEVEDPQIPECAALVRRTMESLEQVQALELQLQVPLKVSLSAGRSWGHLVPLQEAWGPPPGPCRTESPSNSLAAPGSPASTQPPPLHFSPSFCL

SEQ ID NO: 1242 - protein, 351 aa, E. coli
MRKIIHVDMDCFFAAVEMRDNPALRDIPIAIGGSRERRGVISTANYPARKFGVRSAMPTGMALKLCPHLTLLPGRFDAYKEASNHIREIFSRYTSRIEPLSLDEAYLDVTDSVHCHGSATLIAQEIRQTIFNELQLTASAGVAPVKFLAKIASDMNKPNGQFVITPAEVPAFLQTLPLAKIPGVGKVSAAKLEAMGLRTCGDVQKCDLVMLLKRFGKFGRILWERSQGIDERDVNSERLRKSVGVERTMAEDIHHWSECEAIIERLYPELERRLAKVKPDLLIARQGVKLKFDDFQQTTQEHVWPRLNKADLIATARKTWDERRGGRGVRLVGLHVTLLDPQMERQLVLGL

SEQ ID NO: 1243 - protein, 765 aa, Artificial sequence
  Synthetic sequence
MSGDHLHNDSQIEADFRLNDSHKHKDKHKDREHRHKEHKKEKDREKSKHSNSEHKDSEKKHKEKEKTKHKDGSSEKHKDKHKDRDKEKRKEEKVRASGDAKIKKEKENGFSSPPQIKDEPEDDGYFVPPKEDIKPLKRPRDEDDADYKPKKIKTEDTKKEKKRKLEEEEDGKLKKPKNKDKDKKVPEPDNKKKKPKKEEEQKWKWWEEERYPEGIKWKFLEHKGPVFAPPYEPLPENVKFYYDGKVMKLSPKAEEVATFFAKMLDHEYTTKEIFRKNFFKDWRKEMTNEEKNIITNLSKCDFTQMSQYFKAQTEARKQMSKEEKLKIKEENEKLLKEYGFCIMDNHKERIANFKIEPPGLFRGRGNHPKMGMLKRRIMPEDIIINCSKDAKVPSPPPGHKWKEVRHDNKVTWLVSWTENIQGSIKYIMLNPSSRIKGEKDWQKYETARRLKKCVDKIRNQYREDWKSKEMKVRQRAVALYFIDKLALRAGNEKEEGETADTVGCCSLRVEHINLHPELDGQEYVVEFDFLGKDSIRYYNKVPVEKRVFKNLQLFMENKQPEDDLFDRLNTGILNKHLQDLMEGLTAKVFRTYNASITLQQQLKELTAPDENIPAKILSYNRANRAVAILCNHQRAPPKTFEKSMMNLQTKIDAKKEQLADARRDLKSAKADAKVMKDAKTKKVVESKKKAVQRLEEQLMKLEVQATDREENKQIALGTSKLNYLDPRITVAWCKKWGVPIEKIYNKTQREKFAWAIDMADEDYEF

SEQ ID NO: 1244 - protein, 380 aa, Artificial sequence
  Synthetic sequence
MGIQGLAKLIADVAPSAIRENDIKSYFGRKVAIDASMSIYQFLIAVRQGGDVLQNEEGETTSHLMGMFYRTIRMMENGIKPVYVFDGKPPQLKSGELAKRSERRAEAEKQLQQAQAAGAEQEVEKFTKRLVKVTKQHNDECKHLLSLMGIPYLDAPSEAEASCAALVKAGKVYAAATEDMDCLTFGSPVLMRHLTASEAKKLPIQEFHLSRILQELGLNQEQFVDLCILLGSDYCESIRGIGPKRAVDLIQKHKSIEEIVRRLDPNKYPVPENWLHKEAHQLFLEPEVLDPESVELKWSEPNEEELIKFMCGEKQFSEERIRSGVKRLSKSRQGSTQGRLDDFFKVTGSLSSAKRKEPEPKGSTKKKAKTGAAGKFKRGK

SEQ ID NO: 1245 - protein, 487 aa, Artificial sequence
  Synthetic sequence
MILKILNEIASIGSTKQKQAILEKNKDNELLKRVYRLTYSRGLQYYIKKWPKPGIATQSFGMLTLTDMLDFIEFTLATRKLTGNAAIEELTGYITDGKKDDVEVLRRVMMRDLECGASVSIANKVWPGLIPEQPQMLASSYDEKGINKNIKFPAFAQLKADGARCFAEVRGDELDDVRLLSRAGNEYLGLDLLKEELIKMTAEARQIHPEGVLIDGELVYHEQVKKEPEGLDFLFDAYPENSKAKEFAEVAESRTASNGIANKSLKGTISEKEAQCMKFQVWDYVPLVEIYSLPAFRLKYDVRFSKLEQMTSGYDKVILIENQVVNNLDEAKVIYKKYIDQGLEGIILKNIDGLWENARSKNLYKFKEVIDVDLKIVGIYPHRKDPTKAGGFILESECGKIKVNAGSGLKDKAGVKSHELDRTRIMENQNYYIGKILECECNGWLKSDGRTDYVKLFLPIAIRLREDKTKANTFEDVFGDFHEVTGL

SEQ ID NO: 1246 - protein, 927 aa, E. coli
VQIPQNPLILVDGSSYLYRAYHAFPPLTNSAGEPTGAMYGVLNMLRSLIMQYKPTHAAVVFDAKGKTFRDELFEHYKSHRPPMPDDLRAQIEPLHAMVKAMGLPLLAVSGVEADDVIGTLAREAEKAGRPVLISTGDKDMAQLVTPNITLINTMTNTILGPEEVVNKYGVPPELIIDFLALMGDSSDNIPGVPGVGEKTAQALLQGLGGLDTLYAEPEKIAGLSFRGAKTMAAKLEQNKEVAYLSYQLATIKTDVELELTCEQLEVQQPAAEELLGLFKKYEFKRWTADVEAGKWLQAKGAKPAAKPQETSVADEAPEVTATVISYDNYVTILDEETLKAWIAKLEKAPVFAFDTETDSLDNISANLVGLSFAIEPGVAAYIPVAHDYLDAPDQISRERALELLKPLLEDEKALKVGQNLKYDRGILANYGIELRGIAFDTMLESYILNSVAGRHDMDSLAERWLKHKTITFEEIAGKGKNQLTFNQIALEEAGRYAAEDADVTLQLHLKMWPDLQKHKGPLNVFENIEMPLVPVLSRIERNGVKIDPKVLHNHSEELTLRLAELEKKAHEIAGEEFNLSSTKQLQTILFEKQGIKPLKKTPGGAPSTSEEVLEELALDYPLPKVILEYRGLAKLKSTYTDKLPLMINPKTGRVHTSYHQAVTATGRLSSTDPNLQNIPVRNEEGRRIRQAFIAPEDYVIVSADYSQIELRIMAHLSRDKGLLTAFAEGKDIHRATAAEVFGLPLETVTSEQRRSAKAINFGLIYGMSAFGLARQLNIPRKEAQKYMDLYFERYPGVLEYMERTRAQAKEQGYVETLDGRRLYLPDIKSSNGARRAAAERAAINAPMQGTAADIIKRAMIAVDAWLQAEQPRVRMIMQVHDELVFEVHKDDVDAVAKQIHQLMENCTRLDVPLLVEVGSGENWDQAH

SEQ ID NO: 1247 - protein, 167 aa, Artificial sequence
  Synthetic sequence
MSEVEFSHEYWMRHALTLAKRAWDEREVPVGAVLVHNNRVIGEGWNRPIGRHDPTAHAEIMALRQGGLVMQNYRLIDATLYVTLEPCVMCAGAMIHSRIGRVVFGARDAKTGAAGSLMDVLHHPGMNHRVEITEGILADECAALLSDFFRMRRQEIKAQKKAQSSTD

SEQ ID NO: 1248 - protein, 178 aa, Artificial sequence
  Synthetic sequence
MRRAFITGVFFLSEVEFSHEYWMRHALTLAKRAWDEREVPVGAVLVHNNRVIGEGWNRPIGRHDPTAHAEIMALRQGGLVMQNYRLIDATLYVTLEPCVMCAGAMIHSRIGRVVFGARDAKTGAAGSLMDVLHHPGMNHRVEITEGILADECAALLSDFFRMRRQEIKAQKKAQSSTD
